United States Patent Application Publication US 2003/0165843 A1 - sequence listing, part 2

SEQ ID NO: 26375 - DNA, 65 bp, Mus musculus
cagtgatcttgtatgtgggtgaaatcctgcggtacttgtgtaacgtccctgagcaaccagaagac

SEQ ID NO: 26376 - DNA, 65 bp, Mus musculus
attgtgggccgattcttccaagggaactatggcaatgcagctgtgtgggtgacactcatcattgg

SEQ ID NO: 26377 - DNA, 65 bp, Mus musculus
ttgcacgctggaggtaccgtgtttccttgacattctctggaaggacggtcacaggccaagtcaaa

SEQ ID NO: 26378 - DNA, 65 bp, Mus musculus
ccagtcactgggtcacttttggatgctggatcttctaccgtctcataggctgaggcatatgacca

SEQ ID NO: 26379 - DNA, 65 bp, Mus musculus
ttcaggacagtccataggcctcagcaaacaaggcacttctcaggccactgactgacacctctcct

SEQ ID NO: 26380 - DNA, 65 bp, Mus musculus
atcagtcacactatcaggaccaaagaagctgagtgggtacatcttggtcgctctgtacggatgta

SEQ ID NO: 26381 - DNA, 65 bp, Mus musculus
tgtctctgctatccgctcaggataccactatgtctgcctgcgaaacgaggccaaccaacctttgt

SEQ ID NO: 26382 - DNA, 65 bp, Mus musculus
gatgatttctcaactgcaaccctcttcacacctgatggatgtgaggttcgtggagaggacaagca

SEQ ID NO: 26383 - DNA, 65 bp, Mus musculus
ctcttctcacctctgcatgcacttaactttggcattggtggtgacagcacacagcatgtactctg

SEQ ID NO: 26384 - DNA, 65 bp, Mus musculus
tcctggtcaggatgtgtgtctgactggggaaccaagtcatctacccaggtcaggctgggaagtga

SEQ ID NO: 26385 - DNA, 65 bp, Mus musculus
aagggactttgatctagagttggcagactctcaggatggctgagcctgcacttgctaagttggct

SEQ ID NO: 26386 - DNA, 65 bp, Mus musculus
accaaggctgagaagtatgtgaacaaggccaaaggcaagaagttcctccagtacaaccggctgca

SEQ ID NO: 26387 - DNA, 65 bp, Mus musculus
aacatcaagctggcgctggacaagccaggcaagtctaagcggaaagtgaaccaccgcaagtactt

SEQ ID NO: 26388 - DNA, 65 bp, Mus musculus
tttgatcagtgggaccctctggtggaaggagatgatgagaacctgattcctgggtcaccctttga

SEQ ID NO: 26389 - DNA, 65 bp, Mus musculus
gctacaccaagctggtgggaaatgatgtggccagattcatcaactggatggaggaggagtttaac

SEQ ID NO: 26390 - DNA, 65 bp, Mus musculus
ttaactctcacaggctgttagtgtcgaccacagcgggaatagcttggcgtagcaatttggcactg

SEQ ID NO: 26391 - DNA, 65 bp, Mus musculus
ggggctatgcaaagatctgcaaacccctccatgaactgatcatgcagttgctggaggaaacaccg

SEQ ID NO: 26392 - DNA, 65 bp, Mus musculus
tctacaactttgtctcttacaaggagaacgtaggcaaggactgggctgaggacgtgctagctctc

SEQ ID NO: 26393 - DNA, 65 bp, Mus musculus
agaatgttccctcatcaacagtattcgccaagcagccataccaaaggatcccaaaatcctggctg

SEQ ID NO: 26394 - DNA, 65 bp, Mus musculus
gctcaagttcaagtgggaaaacagtgcagtgtgggccaatgtgtggaacacagtgcagaccatca

SEQ ID NO: 26395 - DNA, 65 bp, Mus musculus
actaaaagacctcttgctcccatctgcgcgggcttccgttatgagtgcgctccgagatgggctcc

SEQ ID NO: 26396 - DNA, 65 bp, Mus musculus
gtgcccacacactggtacccttataccttggagaatggcaactacctggacatcactaagacgat

SEQ ID NO: 26397 - DNA, 65 bp, Mus musculus
ctgctcagcagatgcttctacctgtggtagactcacagctgccagtggtgaactttggctccctg

SEQ ID NO: 26398 - DNA, 65 bp, Mus musculus
tggctgcgttgaccctggaggatgaagaggaagtaaagaaggaggctgaccctggagaaacatct

SEQ ID NO: 26399 - DNA, 65 bp, Mus musculus
gcacggaggagaagatctccgactcggagggatttaaagccaacttgtctctcttgcggaggcct

SEQ ID NO: 26400 - DNA, 65 bp, Mus musculus
gcattgaatacagaagacagaacccatctcgttgctctgtttccctcagtaatgttgaagcaaga

SEQ ID NO: 26401 - DNA, 65 bp, Mus musculus
gactatgaaggacaactgactccatcaaggaccccacatatcagagatcaacactacggtgccag

SEQ ID NO: 26402 - DNA, 65 bp, Mus musculus
cactgccttggaaatgttgactgacgtttatgcctggtgatagcatgtcccgagaagcatggaca

SEQ ID NO: 26403 - DNA, 65 bp, Mus musculus
atatgttcacttctaaggacttcacagccagagttgggcctgatgcctcctgtcacctacccact

SEQ ID NO: 26404 - DNA, 65 bp, Mus musculus; identical to SEQ ID NO: 23716

SEQ ID NO: 26405 - DNA, 65 bp, Mus musculus
agcaagtctttctaggtgcagggctgtgacctgtgacatcagcgaggatgaagaggactaacttt

SEQ ID NO: 26406 - DNA, 65 bp, Mus musculus
ggaggtgtttgtgcccttcagtgcgctgctacccatggtggcccccaacgacctggtgtttgatg

SEQ ID NO: 26407 - DNA, 65 bp, Mus musculus
tgctgttgacggtgctggtggcaattgtctacgtggttgctctcctatatgaagagcccttcact

SEQ ID NO: 26408 - DNA, 65 bp, Mus musculus
gagagcagtcagatgacgacatctcaagcccttcggatcatgaggacgtaaaggaagccgagtaa

SEQ ID NO: 26409 - DNA, 65 bp, Mus musculus
caagggcaagatgaagaggattgcctttcagttcacgccttacagctgggtacgctttgagtgga

SEQ ID NO: 26410 - DNA, 65 bp, Mus musculus
gcctgcattctctggtagcaatacagtgtgctggaaggacaggatagctgtttattcccagctgc

SEQ ID NO: 26411 - DNA, 65 bp, Mus musculus
cctatcagaatggtcacctgtttatccagaacccctgactggtggctttggccttagcgatactt

SEQ ID NO: 26412 - DNA, 65 bp, Mus musculus
gcagtggaagttcccctgattctaataaacagagaaaggggccagaagctctgggcaaagtttct

SEQ ID NO: 26413 - DNA, 65 bp, Mus musculus
gtacaaaccacatgtctagtcatgagtggatttactgagagaactggtgatctcccaccatatgc

SEQ ID NO: 26414 - DNA, 65 bp, Mus musculus
ctgctgatcccttagcccctcgaactaatccctcaccctgtacttcattgggcttacttgctact

SEQ ID NO: 26415 - DNA, 65 bp, Mus musculus
caaccaaactctgctaaatgtaggcaggccttaccctgccagcttcactcctgcactctggctag

SEQ ID NO: 26416 - DNA, 65 bp, Mus musculus
attcagtgacactgccatggctaggaacaccccaggtctctgggagtattgccttcgaaactgaa

SEQ ID NO: 26417 - DNA, 65 bp, Mus musculus
ttacgaacctcctttaccacgtaactggatggacggactggaaccttgccctgaatcctgaagga

SEQ ID NO: 26418 - DNA, 65 bp, Mus musculus
tttgcagctaagagggactctccatgtatccagttactgtgggagactgagagactgtgtcctcc

SEQ ID NO: 26419 - DNA, 65 bp, Mus musculus
ttccatcctgagcctctcttcctgcaaagaggtctaggtagtcagtcttgggtccctctattaac

SEQ ID NO: 26420 - DNA, 65 bp, Mus musculus
acttcatggatccctctgtgcgacatcaacgaaaggtccccaacggctacttgcggtttcactat

SEQ ID NO: 26421 - DNA, 65 bp, Mus musculus
ccagacccatcaaaccttcctcactgtggagaaatacgaggactctgtagctgactggcagataa

SEQ ID NO: 26422 - DNA, 65 bp, Mus musculus
tacagtgtagtctcaatgtcacctccataacccttcctcgtcaagaccttcctcgttccctcctc

SEQ ID NO: 26423 - DNA, 65 bp, Mus musculus
tataacatccacagtcgaacggtcacccggtatcctgccaactccatcgtcgtggtcggaggctg

SEQ ID NO: 26424 - DNA, 65 bp, Mus musculus
atgtatacggcatgagtgccattggctgccttgggattcacgccttactgaacttgatgagcaac

SEQ ID NO: 26425 - DNA, 65 bp, Mus musculus
tgagactctgaaaaccactacaggctgtgaccctcacagtgacaagcccttctctgatcacgagg

SEQ ID NO: 26426 - DNA, 65 bp, Mus musculus
aatggccttgttcggcttcgtgctcttcgtggtgctgtggctgatgcatttcatgtccatcatct

SEQ ID NO: 26427 - DNA, 65 bp, Mus musculus
ggcttccttgtgcttcaaaacacccatctctctttgcttccagcatcctctggactcttgagtcc

SEQ ID NO: 26428 - DNA, 65 bp, Mus musculus
agagtcagaggtccttagctgcatccacccatttccagggggacattctaacactgctgaacagt

SEQ ID NO: 26429 - DNA, 65 bp, Mus musculus
acagctgctctaggggaaatgacccagagcttagctcactgtagaggaatgtccttggcggaata

SEQ ID NO: 26430 - DNA, 65 bp, Mus musculus
ccctctgccagtgtggaacccttttccaagagcccgctttccatagtctgctgtagtgaacacat

SEQ ID NO: 26431 - DNA, 65 bp, Mus musculus
cagacccaaggaccaaagctgtgctcagccaatttcaagcagatttggacaatttggagaaagag

SEQ ID NO: 26432 - DNA, 65 bp, Mus musculus
tgtgctgaagcaattccaggaggagctggctatcatggacaaggagattgaggtccggaatgcaa

SEQ ID NO: 26433 - DNA, 65 bp, Mus musculus
gctgagcactggtaactaactagggcccagtcaggtctgctattccacgtgcagagttcctatta

SEQ ID NO: 26434 - DNA, 65 bp, Mus musculus
ttttatgtcccagctcctgtcaggcaggtcattggaggagccagtgtttgactgaattgagagag

SEQ ID NO: 26435 - DNA, 65 bp, Mus musculus
aggcctctttaatctcagtttggaccttctcctctgcccatgggaccacgatggccttgacatta

SEQ ID NO: 26436 - DNA, 65 bp, Mus musculus
ccagaggtctctagtggccatgaagactccaggcattcaggggatataccagtagacaccaaaat

SEQ ID NO: 26437 - DNA, 65 bp, Mus musculus
ttcgagcgcgtcttccgagcccaggtaaactgcagcgagtactttccgctgttcctcgccacact

SEQ ID NO: 26438 - DNA, 65 bp, Mus musculus
tctgcagacatacatggacactcttccggacgtgaagaccacatgcattgtgctcttggtgctct

SEQ ID NO: 26439 - DNA, 65 bp, Mus musculus
accattacctcatcttcttcttcggaagcgactttgagaactacatcagaacggtaagcacgacg

SEQ ID NO: 26440 - DNA, 65 bp, Mus musculus
gcctcaatctcacctctaccttcctcaggaaaaaccagtgtgagaccaagatcatggtactgcag

SEQ ID NO: 26441 - DNA, 65 bp, Mus musculus
cttatggctcatctcattaacgaaaaggatggggaaaccttccagctgatggggctctatggccg

SEQ ID NO: 26442 - DNA, 65 bp, Mus musculus
gtagccaagaatccttctgctcagcttctctactgcagatcagacagtttgacttggggtggtga

SEQ ID NO: 26443 - DNA, 65 bp, Mus musculus
cgatgtacagcaccatctatgagctacaagagaacaatagctacaatgtcacctccatcctggtc

SEQ ID NO: 26444 - DNA, 65 bp, Mus musculus
aatgtaggaattcgtttgcagagaacagaggagcctggtcaatacagtgccttttggggccatac

SEQ ID NO: 26445 - DNA, 65 bp, Mus musculus
acaatttgtcgtcctactgctgactcatttcgacctggagctgggcagcgaggacacagaggttc

SEQ ID NO: 26446 - DNA, 65 bp, Mus musculus
ctcccatgccaaggtctgtgatctgctctccacctgtctcacagagaagtgcaatcccgttctct

SEQ ID NO: 26447 - DNA, 65 bp, Mus musculus
ttggagcaatgtcaagctgatgcagtggtggacacgctggatgacttcatgtctctcttcccatg

SEQ ID NO: 26448 - DNA, 65 bp, Mus musculus
tctactgtgatggagagatagaggggatgagattcttgatgacacagctcataggtagggacccc

SEQ ID NO: 26449 - DNA, 65 bp, Mus musculus
tcagctaccacagtggggacagagccatgaaggctgaacttgcggacttggtgtctcttctagaa

SEQ ID NO: 26450 - DNA, 65 bp, Mus musculus
agctcccgtgagtcagatggcatcttgcaaatgctgcctcaacccatccagcctgccttactcga

SEQ ID NO: 26451 - DNA, 65 bp, Mus musculus
ggtagttgtggatgttcaccttctgattcttgtgggaatgtctacactaattccagttagttaca

SEQ ID NO: 26452 - DNA, 65 bp, Mus musculus
agaggaaccctaaagatgcaaagcacctggaagacaggctttcctcaagaagcaatgccagaggc

SEQ ID NO: 26453 - DNA, 65 bp, Mus musculus
ccgggttggagcattcatacatctcggccaaagcgggcttggaacctccgctccaggacaacact

SEQ ID NO: 26454 - DNA, 65 bp, Mus musculus
tattgggaaagcgctgtcttctgtctgttaggatttgccttttcgcgctgcttggaagaggggtg

SEQ ID NO: 26455 - DNA, 65 bp, Mus musculus
cacaagaaaacagtagctcaggttctgattcggttccatgtccaaaggaatgtggtggtgatccc

SEQ ID NO: 26456 - DNA, 65 bp, Mus musculus
tgtctgacctcggtgccaatctctgggtcaccaagctctggaagttccttagggactttctaagg

SEQ ID NO: 26457 - DNA, 65 bp, Mus musculus
cctccctattgaactcttcacgaaggcattcttcagctccaaggctaaggtgatttacgtgggcc

SEQ ID NO: 26458 - DNA, 65 bp, Mus musculus
tgaactcggaacaagaaatgagatgggaagtttccttcgcaaaggtgttgttggagcctggaaac

SEQ ID NO: 26459 - DNA, 65 bp, Mus musculus
gttttagttcctaatagcttcctgtctgaaatagtctcagtggcctcctagaggaagattacatt

SEQ ID NO: 26460 - DNA, 65 bp, Mus musculus
atgagtcagagcaacatagtcaactacagcctgctgtccaaggagatcatagaccagagcgaggg

SEQ ID NO: 26461 - DNA, 65 bp, Mus musculus
acttggctcaagtgctggagatgctgaaagctcagcttgtcaagtggcaatgggagacacatgac

SEQ ID NO: 26462 - DNA, 65 bp, Mus musculus
aaaacattgcagaggagatgtctggtgcctgggtggtatgcagtgcacatagaaagatggctggc

SEQ ID NO: 26463 - DNA, 65 bp, Mus musculus
gccgtacacaaaagtgaagatttcagcgaaatgccaaggaagtgccatctatctggcttctcccc

SEQ ID NO: 26464 - DNA, 65 bp, Mus musculus
tatcacactgtgagacactgggactgatttggtatcaactgctgtgccattctcctggtcaggag

SEQ ID NO: 26465 - DNA, 65 bp, Mus musculus
tcagcgatcccatgaagaccctgcagctctgaaatttagcttctatgaagtgatctctgctgggc

SEQ ID NO: 26466 - DNA, 65 bp, Mus musculus
ccgtctccatgaacgagaagtttgatctagtgtacaaacagaagatggggaagtgtgacctcacg

SEQ ID NO: 26467 - DNA, 65 bp, Mus musculus
aaaactcagtacctagtcccaagagaaccaatgcgacggtgccatcagagaggagcagtgtcggt

SEQ ID NO: 26468 - DNA, 65 bp, Mus musculus
tggagtaactgagcccgtaacttcccacagggacgactgctgccttgtctacagaagggaaatct

SEQ ID NO: 26469 - DNA, 65 bp, Mus musculus
tctggggtaacacaaaccttgtgaagaatccagggtcactcggaacttattttgaatggttcctc

SEQ ID NO: 26470 - DNA, 65 bp, Mus musculus
ccatggctaactacacaaccatcccaactgaagttatggaccacactatttctcccttcatgagg

SEQ ID NO: 26471 - DNA, 65 bp, Mus musculus
acgcccaggacagactcgatgacgccgcccactatagaggccacgccaaccacgacccaagccac

SEQ ID NO: 26472 - DNA, 65 bp, Mus musculus
ccagagctactttgcttctgtgtcctatttggatactcaggtcggacatgttttgagtgctttgg

SEQ ID NO: 26473 - DNA, 65 bp, Mus musculus
ctaacccctacagtggagcacaggactggatttattctggcagctactgggacagaaactacttc

SEQ ID NO: 26474 - DNA, 65 bp, Mus musculus
tgttcagatgatgaagcgttcagccagccaccctggttcctgcagttccgagaggagcagctgct

SEQ ID NO: 26475 - DNA, 65 bp, Mus musculus
gcctcctgattgtcacaaacctgggtgcttacattctctacttcttctgtgcaaccctcagctat

SEQ ID NO: 26476 - DNA, 65 bp, Mus musculus
agctgaacctgaatctcctggaaaactgggacactctgggttcaaccgttagtcagctgcaggaa

SEQ ID NO: 26477 - DNA, 65 bp, Mus musculus
gccacaggacagtgtcgagttgttggaattcagagatcttaggaaaagctggggtgtaaaggctg

SEQ ID NO: 26478 - DNA, 65 bp, Mus musculus
agctgtttccacagaagcctgttcaggtagttacttcacctacatctgccctacagccagaggag

SEQ ID NO: 26479 - DNA, 65 bp, Mus musculus
acctgtgtttagctttaccatggtgggcaagaccttcacttaccttctggggagtgatgcagctg

SEQ ID NO: 26480 - DNA, 65 bp, Mus musculus
ttatttgctcgtatgtcagggacaggtgtttggcagaagagacttctaggttactgctagattcc

SEQ ID NO: 26481 - DNA, 65 bp, Mus musculus
tcacctgcagctatgatgcccttcccttcatccctttcctcaccatatgccttatctccattcca

SEQ ID NO: 26482 - DNA, 65 bp, Mus musculus
gcaaggcatctatttctgtgtctacccagtgctgcctggtttctgataccaattaggctctcaat

SEQ ID NO: 26483 - DNA, 65 bp, Mus musculus
tttgcctccctgaatgtgcaatccctagggtggcatctgaattggggtggtctgcatcggataaa

SEQ ID NO: 26484 - DNA, 65 bp, Mus musculus
atacacagaagctcatcatcccgaccttgaaagagaggtccaacccggacatcacccctgtgctt

SEQ ID NO: 26485 - DNA, 65 bp, Mus musculus
agctgtagctgtaccaaatcgacctccagatgctgtactgagagatgccacctcactgaatcagg

SEQ ID NO: 26486 - DNA, 65 bp, Mus musculus
cttttcatcgtccagaactcgtacgggtctgcttggaacagtcattgaagcaactccagttggac

SEQ ID NO: 26487 - DNA, 65 bp, Mus musculus
aaatcccagaatgacagcggtagacacagacccatctggcccacagtgccaatgaccacattata

SEQ ID NO: 26488 - DNA, 65 bp, Mus musculus
gatatctgaagttctaatccacaaactcaaccaaaacttggtgcacttcgagctgaagcctggcg

SEQ ID NO: 26489 - DNA, 65 bp, Mus musculus
agcaccttacaagtccgacttcctcaaggcactctccaaggggcagaacgtgacagaggaggagt

SEQ ID NO: 26490 - DNA, 65 bp, Mus musculus
aactgctagaggtttcctgcggtgcatccttggatcgctttctgcctcctagagcccagtagttt

SEQ ID NO: 26491 - DNA, 65 bp, Mus musculus
caggtccatgaagctgacctacaacgaatcaagggtgtttgaaggcattcccacgtatcgcttca

SEQ ID NO: 26492 - DNA, 65 bp, Mus musculus
gagcacccctcatacgaacctaatgggacttacctgttgcctgagcttggtgagagaatgtgaga

SEQ ID NO: 26493 - DNA, 65 bp, Mus musculus
cgtcttcagcggttactgaatccccacactgcggtgtttggggctctctatcctttctgatgatt

SEQ ID NO: 26494 - DNA, 65 bp, Mus musculus
ggctgctgaatttcaccatgaacgacaggcacacaggtccagcctggaacatcctgatgtggacc

SEQ ID NO: 26495 - DNA, 65 bp, Mus musculus
gcttcaagtttggtcttgggaagctgacatttgtgtagaagatggactctgaaagacattccaag

SEQ ID NO: 26496 - DNA, 65 bp, Mus musculus
ggcagtacctgagcaccctgtcccaggtcacagaagactatgtccagagagaacactgattttgt

SEQ ID NO: 26497 - DNA, 65 bp, Mus musculus
actgcacagtccctggctaacttgataaacagggttcccaggactccccaagtgcccacctagca

SEQ ID NO: 26498 - DNA, 65 bp, Mus musculus
ctgggttcctggggcagcacatggtggagcagttgctggagcgaggctatactgtcaatgtattt

SEQ ID NO: 26499 - DNA, 65 bp, Mus musculus
ctcctcaccctctggtgttgattcgacacttcttttccgttgcaatctacgccacgtatttctgc

SEQ ID NO: 26500 - DNA, 65 bp, Mus musculus; identical to SEQ ID NO: 23716

SEQ ID NO: 26501 - DNA, 65 bp, Mus musculus
tgggcatctcctggccagcaccactcctcacttccatagaggaatgtctttgatctcttatctgg

SEQ ID NO: 26502 - DNA, 65 bp, Mus musculus
ccttggaaatcttaggcttattgatgccaaccgctgcagacatgcgtagtgctcagaaatgtaga

SEQ ID NO: 26503 - DNA, 65 bp, Mus musculus
cacttccaggaaaagtgcattttgctgttgaaatgtgggtcctgtccaatgctgattccctttcg

SEQ ID NO: 26504 - DNA, 65 bp, Mus musculus
cagatattcagtgaactggaccaggctggctccatgctagcaagagaaaccctggaggatgggct

SEQ ID NO: 26505 - DNA, 65 bp, Mus musculus
ggatgctaaggatcgggaactgttgtcttaccagctccaaatgtcactacctgaaggcagtgtgc

SEQ ID NO: 26506 - DNA, 65 bp, Mus musculus
actgttttgcctatgctgacttctgccggagactgtctgcatgcctcactgggcatcttagactt

SEQ ID NO: 26507 - DNA, 65 bp, Mus musculus
agatatacggggatgtgctgtacttcctgacagagctacacgaaggactccagcatggggagata

SEQ ID NO: 26508 - DNA, 65 bp, Mus musculus
ttggtacaggtggctagctttgccatgggtcgagatccgggcttctttcccaatccaaacaagtt

SEQ ID NO: 26509 - DNA, 65 bp, Mus musculus
ttcttgaatggtctcactacctcttcctgtttccagtttctcaagcagggaggaacagagactcc

SEQ ID NO: 26510 - DNA, 65 bp, Mus musculus
tccattttacactctgtccaacttgtctttgggtcaccagaagccttgcaagtcactggcccagt

SEQ ID NO: 26511 - DNA, 65 bp, Mus musculus
tgagtctgccttctcggagcgctgagcccactttctgggaatacctttagcgcgcttccttcgtt

SEQ ID NO: 26512 - DNA, 65 bp, Mus musculus
gtacttcctgcctggcacctgctttccctgcctctacttgaccaagagttacacaagaatgcgtt

SEQ ID NO: 26513 - DNA, 65 bp, Mus musculus
ttagctggatctaacaggccacaactgatgcttcttgcttcctgcagtggacttcacctgctctc

SEQ ID NO: 26514 - DNA, 65 bp, Mus musculus
tgactgtatcttacggaatgtcctgtttgctggactgaaatccaggagcaatcccacagcaggac

SEQ ID NO: 26515 - DNA, 65 bp, Mus musculus
gcacaccgtagaagtgcttagagagtatggattcagtcaggaagagatccttcagctgcactcag

SEQ ID NO: 26516 - DNA, 65 bp, Mus musculus
gccaacagatcctgatgctgtgtgtgacttagaagcttgagtctttccatagggttcggagctgc

SEQ ID NO: 26517 - DNA, 65 bp, Mus musculus
ctgccacaaagctgtgagagagatcaggaagcttagaccatctacagaaagggacgccctcattc

SEQ ID NO: 26518 - DNA, 65 bp, Mus musculus
aagtatgtgtggagtaaagctgacctgaagctggactggtgaggctgagatgggaaggaaactcc

SEQ ID NO: 26519 - DNA, 65 bp, Mus musculus
gctcccctcagagacactacagctcctatccagaccctgacactcactcaaagtgccttagcaca

SEQ ID NO: 26520 - DNA, 65 bp, Mus musculus
tctgaaaccagtcattgctttcttcatgttcctgcatgtgtgctgtccactggagtacgggcagc

SEQ ID NO: 26521 - DNA, 65 bp, Mus musculus
taaactctacgaggccgactttgttctctttggctaccccaagccagaaaacctgctcagggact

SEQ ID NO: 26522 - DNA, 65 bp, Mus musculus
gaggaccctgagaagtatgaggagctgctgcaggtcatcaagcagtttcgcgatgaggagcttga

SEQ ID NO: 26523 - DNA, 65 bp, Mus musculus
tgctcggtgacccaaagtttgtcgatgtgtctcaggtgatccgcaacatgagctctgagttctac

SEQ ID NO: 26524 - DNA, 65 bp, Mus musculus
ttgcatggtgctattctctcctgaagtctctgcaatggagggcttcatgatgtggcatattttgg

SEQ ID NO: 26525 - DNA, 65 bp, Mus musculus
tagaagacttctggaggtccccagatctttggagtgtgggaatggaagctgctttgaggcaaagg

SEQ ID NO: 26526 - DNA, 65 bp, Mus musculus
cagactttgagaactctgcctatgtggtattcgtggtactgctcactagggtgatcctctcatac

SEQ ID NO: 26527 - DNA, 65 bp, Mus musculus
tctctgtatactactccctggtgtcagagcaggaacgaaggaaccagcaaggctaggtcatccaa

SEQ ID NO: 26528 - DNA, 65 bp, Mus musculus
ggagtctcatcctactctctctcaagaccagaggtgaagaagttgaggagctatggtgcctctaa

SEQ ID NO: 26529 - DNA, 65 bp, Mus musculus
aacagagtgatttctgatgggttggccatgctgtggtgacaggcatacacaagagcatacaaact

SEQ ID NO: 26530 - DNA, 65 bp, Mus musculus
cgcgggtgcccttcccaaaattttgggccctgtaatttggaaattggagcgcccctcttgggggc

SEQ ID NO: 26531 - DNA, 65 bp, Mus musculus
gctggagagagcagccaagatgaacgattcctttggtggtggctctttgactgccttaccagtca

SEQ ID NO: 26532 - DNA, 65 bp, Mus musculus
aagatacagcgcttcttgtctcagccattccaagttgctgaggtcttcacgggtcacatggggaa

SEQ ID NO: 26533 - DNA, 65 bp, Mus musculus
caattggttgatcacagggccatcaaggagcacgcaagagaaccaagggcaggggcggatcaaaa

SEQ ID NO: 26534 - DNA, 65 bp, Mus musculus
tctggtgccacctagtggtcagaagtagaacttggaagcccaaggtttactcaaagggccaaagg

SEQ ID NO: 26535 - DNA, 65 bp, Mus musculus
ctcatagctgccatctgtgcaggtcctacggctctgttggctcacgaagtaggttttggatgcaa

SEQ ID NO: 26536 - DNA, 65 bp, Mus musculus
aggccctttgatgagactacctatgaagagacagaagactgagcctttctggtgctccctagagg

SEQ ID NO: 26537 - DNA, 65 bp, Mus musculus
tgctgactgggtttgtagcattggcctcttaagcaatgccagcctaatgcccatgctccatacta

SEQ ID NO: 26538 - DNA, 65 bp, Mus musculus
agtttgtcactcgctttggaggcaacagggtcatagagaaggtgctcatcgccaacaatggcatc

SEQ ID NO: 26539 - DNA, 65 bp, Mus musculus
atggagactgtggtgacttcgcccatggagggcactatccgaaaggttcatgttaccaaggacat

SEQ ID NO: 26540 - DNA, 65 bp, Mus musculus
gccgccgcgcacattcagcgctggctcagttgcgctgcatcctggacagcgaactggaagggatc

SEQ ID NO: 26541 - DNA, 65 bp, Mus musculus
ctcgctctctctgctgtatggtgggaggaagtactcactgagtgtgtgaaagaaccacaggtata

SEQ ID NO: 26542 - DNA, 65 bp, Mus musculus
agcaaatggaaggtctgaactgaaagtggccaacagcagggacaaacctggctctgcaccatctt

SEQ ID NO: 26543 - DNA, 65 bp, Mus musculus
tctgactcagacgaagatcatcactcaagacggtgataacttcaagacgaaaaccaacagcacgt

SEQ ID NO: 26544 - DNA, 65 bp, Mus musculus
taactcctaactaaccagctcgcagtgcgctgcagccttccttttaccttcagctgtctcaggaa

SEQ ID NO: 26545 - DNA, 65 bp, Mus musculus
tgaggtgtggcttagcttggagaacccaagagctcaggcacggttggagctttgggccaagagga

SEQ ID NO: 26546 - DNA, 65 bp, Mus musculus
taggatggaacgcagattcggagagatctggagaagctgcctgtgagcatgtcaccgtcctccat

SEQ ID NO: 26547 - DNA, 65 bp, Mus musculus
tcttcacaatcacctagcaagtaaaggggtcactgtcctcagtgggcagccagtctgtgggctca

SEQ ID NO: 26548 - DNA, 65 bp, Mus musculus
acaccccgcagatgatgaacttcttcgtggagaagctgctggtcacgtggaagcgagttgggctg

SEQ ID NO: 26549 - DNA, 65 bp, Mus musculus
tgtgctccacgcagttgagtctgaactgtccgctctgtgtaaatcctgtctgcaggaagactaaa

SEQ ID NO: 26550 - DNA, 65 bp, Mus musculus
ccaagatggagctgatgattatggagacccaggctcaggtgtgtcgggcactggcgcaggtagat

SEQ ID NO: 26551 - DNA, 65 bp, Mus musculus
ttgaacttatgagcgagtgggagcgatcctactttgggaacatgggaccccaatatgttaccacc

SEQ ID NO: 26552 - DNA, 65 bp, Mus musculus
ggcatgggctttaccctgacatggacccagaacgtgtaggagcctttgtggatgctgtacacaaa

SEQ ID NO: 26553 - DNA, 65 bp, Mus musculus
gatcctgctcacaagcgccttcttctggacaccttgcagctcagcaaatgattgcagaggtgctg

SEQ ID NO: 26554 - DNA, 65 bp, Mus musculus
tagttccttttaggatctagacatacgggtaagacatgactctccctggagcagctctctgcaga

SEQ ID NO: 26555 - DNA, 65 bp, Mus musculus
taaatgctgtaagccgtggtccatcccagttgcctagtgcttggggttccagcacaaaagcagat

SEQ ID NO: 26556 - DNA, 65 bp, Mus musculus
cgtggccccagtacctacaagatccctgcatttggcagcatccccattgagttcagagtatccct

SEQ ID NO: 26557 - DNA, 65 bp, Mus musculus
gcctgctctgctctaagatgctaaatgcgaaagccagagtttcacagcccagaatcatctacagc

SEQ ID NO: 26558 - DNA, 65 bp, Mus musculus
agacgctatcataagagcaagcagtaagtgctcagggaacctggacgtagagctggagacaggtt

SEQ ID NO: 26559 - DNA, 65 bp, Mus musculus
ctttcctatccctcctatgggcaatgtgcaatgctcatgtagactgaactgtggagacataaact

SEQ ID NO: 26560 - DNA, 65 bp, Mus musculus
gtacgctgctgttgaagaggacgagatgtccctgtctgagggtgaagccattgaggtcattcata

SEQ ID NO: 26561 - DNA, 65 bp, Mus musculus
ttgatatgtcttccagcccattgaacctggactgcagaaggccccatgtcatgtgtgagctcagc

SEQ ID NO: 26562 - DNA, 65 bp, Mus musculus
tgatgccaggatcggggacttgtcctgattctgcataagtgctcctttctgtgtgatcttcacgg

SEQ ID NO: 26563 - DNA, 65 bp, Mus musculus
gcccaaaggaaacacaagttctaggtccaatggttctgctcaaacctgaacatcattcttggggc

SEQ ID NO: 26564 - DNA, 65 bp, Mus musculus
taccacgcatgcgagcactcagagagactcgtcacacgacttaggggatgttgagaaggcccatc

SEQ ID NO: 26565 - DNA, 65 bp, Mus musculus
aaatacactcagttctctcgttacggtccagtcaccacaaagcacaggcgaagaaatgctatagc

SEQ ID NO: 26566 - DNA, 65 bp, Mus musculus
gctttttgaggttcaacaaataaaatcctgatcagaaaatgacaaaaacaaacgaactataatca

SEQ ID NO: 26567 - DNA, 65 bp, Mus musculus
tcagctagtcgatctgcatgcccgatatgctgagtgtggtttacgaatcctggccttcccctgca

SEQ ID NO: 26568 - DNA, 65 bp, Mus musculus
caatggccgtgtaggccagctccttgcctgcctcattggcactcagtttaggaagctacgtgatg

SEQ ID NO: 26569 - DNA, 65 bp, Mus musculus
tgtcctgtgtcattgtcaccttttggatagcctcatagtcagggataaggaactcaatcccagag

SEQ ID NO: 26570 - DNA, 65 bp, Mus musculus
tccactgagctctgagggagctggaaagcagcctctggagggaggagttttgttcctgatgaaga

SEQ ID NO: 26571 - DNA, 65 bp, Mus musculus
ggagatcatgaggctgctttctgccctgcgaaccactgtttcctggtagagcttttgctggttaa

SEQ ID NO: 26572 - DNA, 65 bp, Mus musculus
ctggggccaataaggattccacttctttctgacctgaaccatcagatctcaaaggactatggtgt

SEQ ID NO: 26573 - DNA, 65 bp, Mus musculus
tcacgagcttcgttacccagggggtgactgcagttctgacatctggatctgaaggctcgcactag

SEQ ID NO: 26574 - DNA, 65 bp, Mus musculus
ggtaagcattctttcccttagcctgccctgaaccttggtctacagtgaagtagcacatagtgcca

SEQ ID NO: 26575 - DNA, 65 bp, Mus musculus
tcactgacgagatggcacactttgacagagagcggattcctgagagagtggtacacgcaaaagga

SEQ ID NO: 26576 - DNA, 65 bp, Mus musculus
tctgatagctctgattgacgctggtggtggaagcccttgggactcgggctaatgagacaaaagat

SEQ ID NO: 26577 - DNA, 65 bp, Mus musculus
ggatggattccaccccaatgaggtggcttcacttctgcaagcaaatcgtgtctgggaaaagatac

SEQ ID NO: 26578 - DNA, 65 bp, Mus musculus
gcacttttgctcattcatcacaaatctccagtcagcttgcacaggaagcgaagagaggttgttcc

SEQ ID NO: 26579 - DNA, 65 bp, Mus musculus
aggggtgagatcaggttcttaccctagttcccactggcttgtgctaaggtctctgggaatttctt

SEQ ID NO: 26580 - DNA, 65 bp, Mus musculus
gatggcctgaacaaaaactttcgataccttccagcagagttccttgttgaccacccagagtatcc

SEQ ID NO: 26581 - DNA, 65 bp, Mus musculus
tctaccagtgctgccgatttgggtgtatggctcaaacctgaaagcatgactctgacttgtcagca

SEQ ID NO: 26582 - DNA, 65 bp, Mus musculus
aggatccagatactcccaagtctgtgaggttccgagtgaaggagactgtatgtggcaaggcagag

SEQ ID NO: 26583 - DNA, 65 bp, Mus musculus
tgatgctggagtgtcctgaaacggtcaacacgctgttacacgagttcctgctgtgggagccagaa

SEQ ID NO: 26584 - DNA, 65 bp, Mus musculus
ggtgcattggcaacactcgtcagattggcagttgtggagttcctttcctcaaatgctgcaagaga

SEQ ID NO: 26585 - DNA, 65 bp, Mus musculus
ccacaaatctcctgctggctactctccagtggtttcatcttacttctgatggcatttccctctag

SEQ ID NO: 26586 - DNA, 65 bp, Mus musculus
ggtgcttcggatctgtccagtgaagagggatggaggctcttcaagattgacaaagagtacttgct

SEQ ID NO: 26587 - DNA, 65 bp, Mus musculus
tcatttcttgctgctcagtctcctgcctcttgcccagtctcccatggctcacagaaaggggccca

SEQ ID NO: 26588 - DNA, 65 bp, Mus musculus
ttgtcgatcttgcgtggagtgaaaaccctgcacaggcgcaacataaacctcgtctggtggtgttt

SEQ ID NO: 26589 - DNA, 65 bp, Mus musculus
acaagatgcctcgactgtgtgtgtacatgctggtcttagtgctggctctagctaccttctcggaa

SEQ ID NO: 26590 - DNA, 65 bp, Mus musculus
aaaggagtccatgcggaagaaggttggcctaatagtgcatatggggtcaccaagattggggtgac

SEQ ID NO: 26591 - DNA, 65 bp, Mus musculus
tcttcaaaccacattggtattacctgctgtgtccccagccagacaaccctgtatctattcacagc

SEQ ID NO: 26592 - DNA, 65 bp, Mus musculus
aggacctgcctcacctggtcaatgcagacggacagtacctcttttgtagatactggaagcccagt

SEQ ID NO: 26593 - DNA, 65 bp, Mus musculus
gtgcaaagctgctacttgaagagatctacaggggtggatgcgtagactcgaccaaccaaagtcta

SEQ ID NO: 26594 - DNA, 65 bp, Mus musculus
aaaagtttcccaccttaatagccttgtgggagatcccccttgggcaagtgggttatatgccgagg

SEQ ID NO: 26595 - DNA, 65 bp, Mus musculus
acattcctggataagctgggaatccctcaagcagtgttcattggccatgactgggctggtgtgat

SEQ ID NO: 26596 - DNA, 65 bp, Mus musculus; identical to SEQ ID NO: 23716

SEQ ID NO: 26597 - DNA, 65 bp, Mus musculus
tcctatccaaaacacagatgaagagactaatactgaggtgcagccacaggaagaggaccaggccg

SEQ ID NO: 26598 - DNA, 65 bp, Mus musculus
tgagactcgccatctctgactcttccatcggtgtccgaggcaaatggaaggtgcgcaaatccttc

SEQ ID NO: 26599 - DNA, 65 bp, Mus musculus
aaagatgaagacctcttccgagaatggctgaaggatacatgtggtgccaatgccaagcagtcccg

SEQ ID NO: 26600 - DNA, 65 bp, Mus musculus
ctacgatgacctccccaagaacatggaaaccatgcacatggagtactttgaagaagccgtgaact

SEQ ID NO: 26601 - DNA, 65 bp, Mus musculus
actcccacaaggcagtatgctcccagaatcccaggctggtacccatcctctttccactgtaagca

SEQ ID NO: 26602 - DNA, 65 bp, Mus musculus
cccagaaaagtgggtgaaggtcaagtaccccaaactcatctcctattcctacatggaacgtgggg

SEQ ID NO: 26603 - DNA, 65 bp, Mus musculus
tctgcatgttgggattcctttgagaccgttgactccttggagaccccactcaactcactgctctt

SEQ ID NO: 26604 - DNA, 65 bp, Mus musculus
ctatctcctttggagacccagaaggctatgctcttcaagatgcagcagccataagaagggctcgc

SEQ ID NO: 26605 - DNA, 65 bp, Mus musculus
gacagtgaacttttgaccttcaatctctctgggcatcgttcctggtgggaagagcatgggccagg

SEQ ID NO: 26606 - DNA, 65 bp, Mus musculus
tgcaagggtgacctcatccagcccaacctggccaaggtgtgcgagctgctaagggactatctgct

SEQ ID NO: 26607 - DNA, 65 bp, Mus musculus
tcaacatggaggattctgtctccgctccagctgcccatctaataccaaactacagggaacctgta

SEQ ID NO: 26608 - DNA, 65 bp, Mus musculus
ggcattgaggccagttatgaagctcagttcttcacagaagacaaccggcttatgctcaacttcaa

SEQ ID NO: 26609 - DNA, 65 bp, Mus musculus
ccagtgtcatacaacaaagtgctataaccctctatgaggctatgggattccaaaggacaggaaaa

SEQ ID NO: 26610 - DNA, 65 bp, Mus musculus
aaagtattggatacgaagcagaacttgaccactgccacaccaatggagggtactgtgtcagagcc

SEQ ID NO: 26611 - DNA, 65 bp, Mus musculus
tttgtacgaacaccagaagagctccaacactcgctgaggcaggctctgcaagacacaagtaaacc

SEQ ID NO: 26612 - DNA, 65 bp, Mus musculus
aatggagccatatgctggggtccgtgccctaccgcttttcgacagattggcaattgtggccattt

SEQ ID NO: 26613 - DNA, 65 bp, Mus musculus
gcttaccctctgatcacatgtagcttacacttgctgctagctggaggtatattaggtaggtgagc

SEQ ID NO: 26614 - DNA, 65 bp, Mus musculus
tggtatagagtttaccagcaagtaggaaaaattccacactaaagtcgagctaaaagtcttcctgg

SEQ ID NO: 26615 - DNA, 65 bp, Mus musculus
acagctggatgagatgagacaaaaggacccagtgaaaggaatgacagcagacgactagcgccacc

SEQ ID NO: 26616 - DNA, 65 bp, Mus musculus
cctggacaatgtctgtttttgggcagctttggtgctcttcagcgttggttctactctcatcttcc

SEQ ID NO: 26617 - DNA, 65 bp, Mus musculus
cctacaaacaagtcccgaggtcacaacaaggagagtgtgcagagaaacagaggagctgaaaacgc

SEQ ID NO: 26618 - DNA, 65 bp, Mus musculus
cattaccttctggcgtcagagttctggagcactacagggctgtacctgtccaaatgtgcagtgct

SEQ ID NO: 26619 - DNA, 65 bp, Mus musculus
tcttcaacctgagtggggctgagagaagacagagaatcgtggataccatcgacatcgtgcgggat

SEQ ID NO: 26620 - DNA, 65 bp, Mus musculus
agagcttagcatctccagggatgagtacccatctgtcctcatgtacctgaatgccactcagactg

SEQ ID NO: 26621 - DNA, 65 bp, Mus musculus
cagcacccagtggacaatgctggacttttctcctacatgaccttttcatggctctctcctctggc

SEQ ID NO: 26622 - DNA, 65 bp, Mus musculus
accaaggctaaccaaacagcttgcacgtcccatcacagtggtggatgtgggccttccaaagaaat

SEQ ID NO: 26623 - DNA, 65 bp, Mus musculus
acagttagttctctgagtttaagcctcaggcttccagacttcctggactgttcttatgtgggccc

SEQ ID NO: 26624 - DNA, 65 bp, Mus musculus
tagaaaggtgtatgtggaaggtgtctggagcagagaagaaatgcctgtcagtgacatccagctgc

SEQ ID NO: 26625 - DNA, 65 bp, Mus musculus
ccagagtgttcaaagacagctaatgacgctatccaggacatgttatgtgacatggagggactgcc

SEQ ID NO: 26626 - DNA, 65 bp, Mus musculus
agaggcccagaaacactggaatgactgtctacatcagccggacacagccctggagcgctggcata

SEQ ID NO: 26627 - DNA, 65 bp, Mus musculus
aactcttgcttcgctcctacccggagtttgtgagagtgggggacttgccatgtgacagtgtggaa

SEQ ID NO: 26628 - DNA, 65 bp, Mus musculus
taccgtatagaggctggaccacagggaaccttgtctagccttttccacatccctttaggacactt

SEQ ID NO: 26629 - DNA, 65 bp, Mus musculus
aggtgccgaacagtagccttggaaactggaatgcagaacactcagctgtgctccaccattgtaca

SEQ ID NO: 26630 - DNA, 65 bp, Mus musculus
aagggtgacaccttgtccaactctagagcatcacaccgactctgaccgactcgtctttacaactc

SEQ ID NO: 26631 - DNA, 65 bp, Mus musculus
attgacctgtccaccacactctcggatgttgccggttacacacacaggattggagagcttcagga

SEQ ID NO: 26632 - DNA, 65 bp, Mus musculus
aacagggttttctcgaagccaacacccctagaatccagatgggcctgtctgacagaaaggcagtt

SEQ ID NO: 26633 - DNA, 65 bp, Mus musculus
acactggcaccagctagtggaggagaagactctgagcagcttcacaaagggtggcaaaggattgt

SEQ ID NO: 26634 - DNA, 65 bp, Mus musculus
aatgacgtcgtcccaggaggaaacttcagcctctatgctttgaagagctgctgcaacctgctgaa

SEQ ID NO: 26635 - DNA, 65 bp, Mus musculus
tccttggcttaaccatcattccagctatcctgcaaagcgcagcccttccattttgccctgagagt

SEQ ID NO: 26636 - DNA, 65 bp, Mus musculus
acaagaaaaaccaaagacagacacaaatgagaggggacaaacaaggaacacacaaaagaaataac

SEQ ID NO: 26637 - DNA, 65 bp, Mus musculus
tcaggcttcctaagggataagacaggagacttcagtgcctctttcctggtgtgcagctctttcat

SEQ ID NO: 26638 - DNA, 65 bp, Mus musculus
ggagcggatagacttggatgcagaagaattggaaactcaagaagaagctggtggtgcttttgaag

SEQ ID NO: 26639 - DNA, 65 bp, Mus musculus
caggaaagagcacaattttgcgcctgctatttcgcttctatgacatcagctctggctgcatccga

SEQ ID NO: 26640 - DNA, 65 bp, Mus musculus
caaaatcaagcaccacagagatggccttccaagaagatcaccaagataattccatttttcttagc

SEQ ID NO: 26641 - DNA, 65 bp, Mus musculus
tgctggcctcagctttattctgggcaatcaggatcattggcacatcctacttggcctatctgctg

SEQ ID NO: 26642 - DNA, 65 bp, Mus musculus
accactgtggagatcttcttgacgctccagttcgtgctctgcatctttgctacatacgacgagag

SEQ ID NO: 26643 - DNA, 65 bp, Mus musculus
ggaaatgtacacacagacaccacaactcaatggcatacaagagagtgagagactctggagtactc

SEQ ID NO: 26644 - DNA, 65 bp, Mus musculus
aagaaaacccaacaatagggcaaggtcacaaagtttctaaatgaaactgtacagagagatgaaag

SEQ ID NO: 26645 - DNA, 65 bp, Mus musculus
acaccaggctcagaagctgaagaagaaacagacaaaacgggccaagcacaagatcaaccccgtgt

SEQ ID NO: 26646 - DNA, 65 bp, Mus musculus
ggaggagaacggagctgatgatagaactgaagaagaccaaactgagaaacctcgtggatgtctca

SEQ ID NO: 26647 - DNA, 65 bp, Mus musculus
ctgagtggctgggacccctctcctacttcccactatgcatccattttgcctctgccttgatcttt

SEQ ID NO: 26648 - DNA, 65 bp, Mus musculus
tataccgtcaccttatgctctctctgggcactgtggagcagaatgtgacaatggagaccgctggt

SEQ ID NO: 26649 - DNA, 65 bp, Mus musculus
gtgaaaccaagaaattacactggacttagtgagcagtcaagcagctcttaggacacgtatgccat

SEQ ID NO: 26650 - DNA, 65 bp, Mus musculus
gtattgtgcacggctttagggggacaggcacactcggtgctgttcctgacaattggtacacatta

SEQ ID NO: 26651 - DNA, 65 bp, Mus musculus
atttgatgtctgggagaaggtactagattcagggagcagccatgcccagctctgcacttgatcct

SEQ ID NO: 26652 - DNA, 65 bp, Mus musculus
gcatgcttcagcacttcccagacattcttcctcgggaatatggcggtaaagagttctccatggag

SEQ ID NO: 26653 - DNA, 65 bp, Mus musculus
aactggtgggaagcctgagtggcagatatcagaagatcggaagcctgcgccatcactcatcgaac

SEQ ID NO: 26654 - DNA, 65 bp, Mus musculus
tacactcggaggaacctcaggccttgtgacttgaagaggagtcgagaagatgccatttacaccac

SEQ ID NO: 26655 - DNA, 65 bp, Mus musculus
ggccatggactgtgtgggtagatgctcatggaaatgtgcagtagtatgttcatgtgctctcagct

SEQ ID NO: 26656 - DNA, 65 bp, Mus musculus
atctcctcttgtcttgtctatggctttctgaagctgtgaaggccagcggaagcacatgcctctca

SEQ ID NO: 26657 - DNA, 65 bp, Mus musculus
cagatgagaagtttgtagaaggagtgtacagagtagaactggacaccaaatcgtactggaagaca

SEQ ID NO: 26658 - DNA, 65 bp, Mus musculus
ccagtcactgattttgacagattaaccaagaggccttcccagtttcccatccttcccacctgtca

SEQ ID NO: 26659 - DNA, 65 bp, Mus musculus
ccctgtcagcatagtgatttccacacctgcttttgcctcaattctgaacttggctcagactcctg

SEQ ID NO: 26660 - DNA, 65 bp, Mus musculus
catgcagtgttggccatcaatggcatggacgtgaatggcaagtacacggctgacgggaaagaagt

SEQ ID NO: 26661 - DNA, 65 bp, Mus musculus
ctacaccggaaagatggcaccagttgctggcaagaaggccaagaaggggatcttagaacgcttaa

SEQ ID NO: 26662 - DNA, 65 bp, Mus musculus
agacctcccgtcctcctcatccgaggcaaccaggagaatgtgctcaccttttactgccagtgatg

SEQ ID NO: 26663 - DNA, 65 bp, Mus musculus
acgagccagtgcccctatctatgtgtgtctgtctgttgatctgcctgttgtagtcttagcctctc

SEQ ID NO: 26664 - DNA, 65 bp, Mus musculus
tccaaatgcatcactcgaaccccgacccagaagtgaaggcagaaccagccgagaacaatctagaa

SEQ ID NO: 26665 - DNA, 65 bp, Mus musculus
tgagttacatcaacaaggatgagcagaggctgagctaagcctacctctgtcccagccatagccat

SEQ ID NO: 26666 - DNA, 65 bp, Mus musculus
ggaaaagtcatgccaagacacagaagccctgtgttgtctgatgtcactctgtctcagcttgtaat

SEQ ID NO: 26667 - DNA, 65 bp, Mus musculus
tgaagctctgatgatcttaacagcagtaggcagataaggggtttcccacccaggattccagggag

SEQ ID NO: 26668 - DNA, 65 bp, Mus musculus
atgaaacaagagcttctcattaacctggtgaagcaaaagcctgaactgacagaggagcagctggc

SEQ ID NO: 26669 - DNA, 65 bp, Mus musculus
ggaagctcccagttccaggatgatacactgcttttccagcatactctatctgctctgacatcttg

SEQ ID NO: 26670 - DNA, 65 bp, Mus musculus
gaccctggtggatttagggactgtcccctcccatactccaatagaggcctatcctgactagagaa

SEQ ID NO: 26671 - DNA, 65 bp, Mus musculus
aaactccaaaagagtgtcctgccatagattatacaagacacacactggatggtgctgcatgtctt

SEQ ID NO: 26672 - DNA, 65 bp, Mus musculus
ggtgacaggaggtatctttccctactcaaacctcaccatgcatcaccacgggaagctatgtagtt

SEQ ID NO: 26673 - DNA, 65 bp, Mus musculus
ctttgaatggaagacgtgttcttgccagcttccttttgtctcagtgcaacactgtggatgctatt

SEQ ID NO: 26674 - DNA, 65 bp, Mus musculus
tgggtgtctatggctcctggatgcccctgctggtgtatggagtggtgccagtgttaagtggccta

SEQ ID NO: 26675 - DNA, 65 bp, Mus musculus
ggcaatgagtgtgccagagttactagtgccaagttgctcagaaagtctgaagcactgagtgtgtc

SEQ ID NO: 26676 - DNA, 65 bp, Mus musculus
tccaccatccagaacgcggacttgatcgtggtgattgagaacggcaaggtcaaggagcacggcac

SEQ ID NO: 26677 - DNA, 65 bp, Mus musculus
tctttgcccaagattggaaggctggtaatacaggaaatgcctgcgcaatgctggtcctagcccaa

SEQ ID NO: 26678 - DNA, 65 bp, Mus musculus
attgtcccacagtggagagtggaatctgtagaccaagttcctgtttcggttctctgaccgtcctg

SEQ ID NO: 26679 - DNA, 65 bp, Mus musculus
tccagtgccacgttcgaaaaggaatctgtcatgtgaatatcaggagggactttctacgccctggt

SEQ ID NO: 26680 - DNA, 65 bp, Mus musculus
caactccattgtctcactccagctcgtggaagatgaagggaggagtcctaaagagttctaggtcg

SEQ ID NO: 26681 - DNA, 65 bp, Mus musculus
tatagaggccagtcataggctcttggtctcgtgcaaagccatcccttgcctttaccgggttgact

SEQ ID NO: 26682 - DNA, 65 bp, Mus musculus
gataactcagccactttgaagcattagtgctgcctttgcagagtcaaggcttggatggggtacgg

SEQ ID NO: 26683 - DNA, 65 bp, Mus musculus
gagggcaagagacacgacggaaggatcaagcaaaggagagatgaacacgagatagggaaatactc

SEQ ID NO: 26684 - DNA, 65 bp, Mus musculus
gctcatgtcctgcaccattgggatgtgctatctcctgattgctcacattgtggtgggatggaatt

SEQ ID NO: 26685 - DNA, 65 bp, Mus musculus
agcataccaacgtccttggggccaatgatggtcccaagaagctgtctccacaagcacagtctgtg

SEQ ID NO: 26686 - DNA, 65 bp, Mus musculus
tctaagcagcctttgagcctagtgggaggccagccatccagaaaagtagcagagggctagaaaga

SEQ ID NO: 26687 - DNA, 65 bp, Mus musculus
aatacggcagtcctgaagaactgctgtccaatatgggtcccttctacttgatggccaaggaagcc

SEQ ID NO: 26688 - DNA, 65 bp, Mus musculus
tggcgatgggtatggtgactggactcctcacaggttgtctcctaagtgtcagagtgtggagggct

SEQ ID NO: 26689 - DNA, 65 bp, Mus musculus
tatggctatgcaggcagcagcactgggatcttccattggctcagcgattgttggaggtttgctta

SEQ ID NO: 26690 - DNA, 65 bp, Mus musculus
acagccatcctcacagtacacaagcgccaggagaggccaaagaacctttactccaggacacgaat

SEQ ID NO: 26691 - DNA, 65 bp, Mus musculus
atgttaccaagtgctgtagtggatccctggtggaaaggcggccatgcttctctgctctgacagtt

SEQ ID NO: 26692 - DNA, 65 bp, Mus musculus; identical to SEQ ID NO: 23716

SEQ ID NO: 26693 - DNA, 65 bp, Mus musculus
aaaccccctttcctgattttgcctgtgaacaatggttaattgttcccaagagagcatctgtcagt

SEQ ID NO: 26694 - DNA, 65 bp, Mus musculus
cggaggcaagtcttcgttgctagatgtcttagcagcaaggaaagatccaaagggattatctggag

SEQ ID NO: 26695 - DNA, 65 bp, Mus musculus
acccattaaggatggacacaacacatcacacctctcaatttgcagccccaacatctcccaggagc

SEQ ID NO: 26696 - DNA, 65 bp, Mus musculus
gactctcacctgtacatacagctttccctgttctttagggtcataacagtttccgcagtctggca

SEQ ID NO: 26697 - DNA, 65 bp, Mus musculus
ctcagccaatgcatgaagtatgaggtggactggaaccagagcacccttgactgtgtggacccact

SEQ ID NO: 26698 - DNA, 65 bp, Mus musculus
agcagattttgactaaaggagaagttcaagtgtcagataaagaacggcacacacagctggagcag

SEQ ID NO: 26699 - DNA, 65 bp, Mus musculus
atgatagagttggccacaacgagatcataggagtctgtagagtggggatcaatgctgaaggcctt

SEQ ID NO: 26700 - DNA, 65 bp, Mus musculus
ccaccgtccacaccataaaagcctccaaataagaccatatcacagaaagatctagaaccgtgtgc

SEQ ID NO: 26701 - DNA, 65 bp, Mus musculus
tctgggctctggtatgccatcgccaaaaaggaccccgagggtctctttttgcaagacaacatcat

SEQ ID NO: 26702 - DNA, 65 bp, Mus musculus
aggtctgtccctgcctgcggtcatgatgctcatagcctgtgagaagtagcatgaagagaagctga

SEQ ID NO: 26703 - DNA, 65 bp, Mus musculus
aggaacacaatagtacatacctgacagggcaaggacggttagagcgcatcagtctccatttgggg

SEQ ID NO: 26704 - DNA, 65 bp, Mus musculus
cctgagttgataatgagtggtctctctttagctttgtatgaggtgagacactgagaagcctaggc

SEQ ID NO: 26705 - DNA, 65 bp, Mus musculus
aatggagagtcacctagacactccctacaatgtcccagatgtggtcatcaccatcgccaataatg

SEQ ID NO: 26706 - DNA, 65 bp, Mus musculus
ttcagggtaaaagatgtgttttgcttagaaacagaagagtccaaccgagtcaccaaggaggcctc

SEQ ID NO: 26707 - DNA, 65 bp, Mus musculus
aagttacatctggccaaggtgggagactgcatgggagattctggggacaagcccttgagacgcaa

SEQ ID NO: 26708 - DNA, 65 bp, Mus musculus
ctctcttccgactaaatccaagctgcagacgcaccatcagcatggaaacaggattccaaaacgtc

SEQ ID NO: 26709 - DNA, 65 bp, Mus musculus
atcatcttctaccttgctggctctgaagtggccttggcaggagtcttcatggcagttaccaccta

SEQ ID NO: 26710 - DNA, 65 bp, Mus musculus
caagatcaagcatctctccaaggtgttccaagtgggcaataaggacaagatgggcatcagagacc

SEQ ID NO: 26711 - DNA, 65 bp, Mus musculus
gctggtcttcatgatgcaattcttcgaatgccacatggatatgacacacaagtaggagaacgagg

SEQ ID NO: 26712 - DNA, 65 bp, Mus musculus
accactaccttttggtcaaagaagaccctggtgacaaaggagagctgttctcagaaagacgaacc

SEQ ID NO: 26713 - DNA, 65 bp, Mus musculus
ccccatttcctgcctgtctctgaccttttatctccttttagagtcatctatgttagcttcctttc

SEQ ID NO: 26714 - DNA, 65 bp, Mus musculus
cagacattccagtcattggctgtaaaggcatcaaaggctaagcagggagtatagccagctaagcc

SEQ ID NO: 26715 - DNA, 65 bp, Mus musculus
gcctcctctctggcttacaagtggctaaaatggagaagcatcctttatagtctcagcagagccag

SEQ ID NO: 26716 - DNA, 65 bp, Mus musculus
tgcagtacggtgcaggtatcatgctaatcctgggtgccattggcaaattcacagctctctttgcc

SEQ ID NO: 26717 - DNA, 65 bp, Mus musculus
tgtgctggagaaggttgcagccactcaggtggacggttcagcgaagtacaaggtcaccagaatat

SEQ ID NO: 26718 - DNA, 65 bp, Mus musculus
attccaaagtggatctgcggtgaagccaaggaagccccatagttatcagccacctaaaccaggga

SEQ ID NO: 26719 - DNA, 65 bp, Mus musculus
aatcgagttctgctacaaatcccgtagcgagtcgaagcggatgaagggtttctgtttgattccac

SEQ ID NO: 26720 - DNA, 65 bp, Mus musculus
ctggtcaccgtaggacatataagcacctatacactcaactgtgtctccctgggcttcatcctctt

SEQ ID NO: 26721 - DNA, 65 bp, Mus musculus
tgatgaaggcatcatctggctctaccagcgtccacaaagtgacaaagcaaagaactgaccagggc

SEQ ID NO: 26722 - DNA, 65 bp, Mus musculus
gagtccatggggactgcattgagagcacaaattttgtttaataaaattgattcttaataacaaaa

SEQ ID NO: 26723 - DNA, 65 bp, Mus musculus
acacacagcaaagcaccaacgacaaggaggacagcaaacgaaactgcgcacagcacaagcatgac

SEQ ID NO: 26724 - DNA, 65 bp, Mus musculus
agcacctctgaatggtttgacagccactttgacggcaacatctcacccgtctggaccagagataa

SEQ ID NO: 26725 - DNA, 65 bp, Mus musculus
tcgctctagggttgaaaaggctcttcctggcaagagtctggctatggccaagagagtcttgattt

SEQ ID NO: 26726 - DNA, 65 bp, Mus musculus
aacttcaagctcctgagccactgcctgctggtgaccttggctagccaccaccctgccgatttcac

SEQ ID NO: 26727 - DNA, 65 bp, Mus musculus
ttttatgcaggtcatcgggaggagctagcccagaaggcactgctggtgtctgtgtgggactatga

SEQ ID NO: 26728 - DNA, 65 bp, Mus musculus
atcgtcaccaattgggccggtatggatctctggagaactggccatgcgtcctgttgcgagcttat

SEQ ID NO: 26729 - DNA, 65 bp, Mus musculus
aaggattatcctacatacgcactagctgtcattgggcttctggtagcctcctccaccatgtgcat

SEQ ID NO: 26730 - DNA, 65 bp, Mus musculus
cagggagccacagctaactttgagaactcctttgagggctcatcctttgcaatgggtgacattgc

SEQ ID NO: 26731 - DNA, 65 bp, Mus musculus
aacttggagacaggttcataacagccgtgtttctgtagtgcccttaagtcatcttaaacccgtgc

SEQ ID NO: 26732 - DNA, 65 bp, Mus musculus
ccatttataccactactagtttagagctgtatgtgggatgattcagtaccgactgaatggatgtg

SEQ ID NO: 26733 - DNA, 65 bp, Mus musculus
gctaaccgaacgctcattgtcaccactattctggaagagccctacgtgatgtacaggaaatccga

SEQ ID NO: 26734 - DNA, 65 bp, Mus musculus
aaacggaagctgagcgacacgttagctctggttggtgacccagctgtggtctttctggacgagcc

SEQ ID NO: 26735 - DNA, 65 bp, Mus musculus
aagtgggacaggtacaccatccggtgatgccaagtcccagtttggggaccttactccctaactat

SEQ ID NO: 26736 - DNA, 65 bp, Mus musculus
agatatcaacatcggggtaaagagtggcaacaccacgggaaatgcgggcaccgacaactgcgcac

SEQ ID NO: 26737 - DNA, 65 bp, Mus musculus
tcgctggacgtgctggagcaacgactgcgactgcgcaacactgagactgaggagagtctggcaaa

SEQ ID NO: 26738 - DNA, 65 bp, Mus musculus
tgagatggtgcacgtagaaaacccacgcacttgctcatctgcgcacctgagttgtgatgaaaaca

SEQ ID NO: 26739 - DNA, 65 bp, Mus musculus
tgaaaccgccactgccttcgctgaaaccgctgctgccaccatggcccagtacaagggcgctgcaa

SEQ ID NO: 26740 - DNA, 65 bp, Mus musculus
atcctttctgttgtgaggcatctgcatcatttgcaacgtgcaggagcctacctgtcttgctgcct

SEQ ID NO: 26741 - DNA, 65 bp, Mus musculus
ttgcaagctcagggactggctgcgttggacctaggaggttcctcagatccctatgttagtgtcta

SEQ ID NO: 26742 - DNA, 65 bp, Mus musculus
ggatgcggttaagagcatcgacaacctctctagtgctttgactaagctgagcgagctgcatgcct

SEQ ID NO: 26743 - DNA, 65 bp, Mus musculus
tgcctggttcgtgactgtgcccgtggctggactcttcagtgctgctatcatggctctcctcatgt

SEQ ID NO: 26744 - DNA, 65 bp, Mus musculus
aaacagacaatcaccaagtggcctggagacatcctggcctacaaggagcacctcaagtccaagct

SEQ ID NO: 26745 - DNA, 65 bp, Mus musculus
tggcaggcactagagggagagtaaggctatagaagccaatggagggaggggactcatggaaagtt

SEQ ID NO: 26746 - DNA, 65 bp, Mus musculus
acagttggacactgctatccgtttaacgttgagtgaggaaaagcaaaagttggagtcgcagctcg

SEQ ID NO: 26747 - DNA, 65 bp, Mus musculus
ccagggagtgcatcctttggaaggatatcgagtatgtcaccaacgataatgtggatctgggcgag

SEQ ID NO: 26748 - DNA, 65 bp, Mus musculus
gtgggaggcagatttgatgccacgcaggcctttgttggagagctcagccagttcaacatatggga

SEQ ID NO: 26749 - DNA, 65 bp, Mus musculus
tggtcctggaacccggattccaagagctgctgtccaagtgcttgatgatattgagaagtgtttgg

SEQ ID NO: 26750 - DNA, 65 bp, Mus musculus
tcgggcccatagtagcaggccatatcgttcactcacttggctttgagcagctcagccttggcatg

SEQ ID NO: 26751 - DNA, 65 bp, Mus musculus
gtgggtggcagagaattcagagcactcgtccgatgttgaagatgtcatcgagagtgttcaattca

SEQ ID NO: 26752 - DNA, 65 bp, Mus musculus
gatggcagaacccatcttaatgacaagtatggctactgattggctcagagtcccaaaggaagacc

SEQ ID NO: 26753 - DNA, 65 bp, Mus musculus
ctcgaatgatgaatcagagggcaatagtgggacatgtggacctctacaagggtactttggatggt

SEQ ID NO: 26754 - DNA, 65 bp, Mus musculus
gagacgcccactgagtacctgcagcggagcttcaatctgccctaccaggatgcccggaagtgctt

SEQ ID NO: 26755 - DNA, 65 bp, Mus musculus
gaagcttactctgtaggttcattctgatcaacaatatcttctgttgtttgtgcatagcaatggac

SEQ ID NO: 26756 - DNA, 65 bp, Mus musculus
ccctgagtgtaccctgtgggcagggctgtgtcccctgtgcttttctactaaaggcctcacaagat

SEQ ID NO: 26757 - DNA, 65 bp, Mus musculus
agttccttgtcattgacttcgatcgcactactaagaatgaggtggtagggaggctgatcttgggg

SEQ ID NO: 26758 - DNA, 65 bp, Mus musculus
gcctgtttccttggctttgaaattgccatgaagttccttaattggattgcccccaacttgtgaag

SEQ ID NO: 26759 - DNA, 65 bp, Mus musculus
agtgccacgtctcaggccgtgtatcagctcttcggaatgtttgtcacactggtgtttgcctctgt

SEQ ID NO: 26760 - DNA, 65 bp, Mus musculus
atgtttgaagagacatgctgctttctggtcccaccagcagagctgcccaaagccactctgaaggt

SEQ ID NO: 26761 - DNA, 65 bp, Mus musculus
cagcaccatccaccttcccagggtgacatgggctgccccaagtatcctgtgactcttctctgcag

SEQ ID NO: 26762 - DNA, 65 bp, Mus musculus
gttgtggaaattgcaaggtgactcacagccacagcgcctacaaatattcactagcaaggggaagg

SEQ ID NO: 26763 - DNA, 65 bp, Mus musculus
ccttaattgccatagccatagttgcggtccttctagtcgtgacctgctgcttctgtgtctgtaag

SEQ ID NO: 26764 - DNA, 65 bp, Mus musculus
atggacagtgaagccatgtgagaggagaatgtcttcagagactccaagggaaagcaagcccactg

SEQ ID NO: 26765 - DNA, 65 bp, Mus musculus
ctcacgaagctcactctgtcacactgtgcctaagaactccaaatggaaagtgccaaacggctgat

SEQ ID NO: 26766 - DNA, 65 bp, Mus musculus
tcactgcaagacatcagtctgaggctggagctctgctggggacagagcccttggaaggccagtgt

SEQ ID NO: 26767 - DNA, 65 bp, Mus musculus
agtaccgagagaacaacaaagggccaatgatggacttcctggccacagcagtgttcgctttcatg

SEQ ID NO: 26768 - DNA, 65 bp, Mus musculus
caccaaactggacttgtggagaaatgcacactatctcatgaattctgggccactcttccagatgg

SEQ ID NO: 26769 - DNA, 65 bp, Mus musculus
ctgcaccccaggaagagcaaggacagctaaataggcagaaagccatgagccctggctgtaaacat

SEQ ID NO: 26770 - DNA, 65 bp, Mus musculus
gtcacgatacactacagtggatctgccagtgtggagcagggactctttaccagggcttctacttt

SEQ ID NO: 26771 - DNA, 65 bp, Mus musculus
tggtggcaccacttctgggcgcctacctaggtggtattgtatacctgggtttaattcaccccagc

SEQ ID NO: 26772 - DNA, 65 bp, Mus musculus
attgtagacactctgacaagctgaccaaagtcactccccaagacctgcctgacccacatggtcta

SEQ ID NO: 26773 - DNA, 65 bp, Mus musculus
tcgggagaggtattgtcttccgtatgactagaggacagcactgaaggcagaagagactccctaga

SEQ ID NO: 26774 - DNA, 65 bp, Mus musculus
tgggtcgacagaaggagttgatgaatcgttgtggggagatgcttcacatccgctaccggctgctt

SEQ ID NO: 26775 - DNA, 65 bp, Mus musculus
gcgacgttcccactgcctggagtcctcagctgcttgtcctaagttgaggacggaacaattccatt

SEQ ID NO: 26776 - DNA, 65 bp, Mus musculus
tccctggctccagcagttgtcactggcaagtttgatgatcactgggtcttctggatcggacccct

SEQ ID NO: 26777 - DNA, 65 bp, Mus musculus
tcccagaaaggggtgatagccctgtttatctctccaacccagtatctcatgtgccaaagccttcc

SEQ ID NO: 26778 - DNA, 65 bp, Mus musculus
agctccatgggtgagggttccagttgatgagttttatcatcccactctggactgtggggtcacaa

SEQ ID NO: 26779 - DNA, 65 bp, Mus musculus
accccactgatggcccgtgatcgtctttcagctgtctctgctacctgtcaatagctcctccatca

SEQ ID NO: 26780 - DNA, 65 bp, Mus musculus
gagacccgcttgcatgtcactggtagagacctgaggtgtcaaatagctgaaactttcggatttca

SEQ ID NO: 26781 - DNA, 65 bp, Mus musculus
acaactccacacccaaagagttcaaagagtcattgcataacaatccggccaacagacgcaccacg

SEQ ID NO: 26782 - DNA, 65 bp, Mus musculus
ggtattttcctgtcaactgtggtccaaggtacgagctctgtaagagttccaccaattgctttgtt

SEQ ID NO: 26783 - DNA, 65 bp, Mus musculus
atggcacatgcaaagaggagttcacagtcaatggtgaccctgtcaagaaggtgatctgtacgggg

SEQ ID NO: 26784 - DNA, 65 bp, Mus musculus
taacagctttctccaggtccacaactgtatccagaaggacagcaaggactctctccacgccaaca

SEQ ID NO: 26785 - DNA, 65 bp, Mus musculus
taccattacggtggctaacactggctgcctggtcaaacagtctcaaggttgcagtcgtactctat

SEQ ID NO: 26786 - DNA, 65 bp, Mus musculus
gcacgaagagacctcagacatcttttccttcagcgggctattagggagacactattgtggcatag

SEQ ID NO: 26787 - DNA, 65 bp, Mus musculus
aaccacagaactctctacaacgtttgatccttgtgttgttcgtgaaggttcctagccttgtcccc

SEQ ID NO: 26788 - DNA, 65 bp, Mus musculus; identical to SEQ ID NO: 23716

SEQ ID NO: 26789 - DNA, 65 bp, Mus musculus
tgggcagtctcatcctgggatatacccgttcacgcaaagtggacaaacgtagtgacccctatcat

SEQ ID NO: 26790 - DNA, 65 bp, Mus musculus
ggccacttgctctgttgaggaatcaaatgtacccagggtcactgtgtaccttgtctttgagatac

SEQ ID NO: 26791 - DNA, 65 bp, Mus musculus
cgccatccaagtccccggaggagatgcggaaactcttcatccagagagccaagaagatcgacaag

SEQ ID NO: 26792 - DNA, 65 bp, Mus musculus
ttcatacaagaacaagagacccctgtctgacagtccagagcagagcagagtattcagctcaggga

SEQ ID NO: 26793 - DNA, 65 bp, Mus musculus
ggctagaaaatgcccaagctcaacttgaagatgaaggcaacttctactctgaaaatgtcagtcgg

SEQ ID NO: 26794 - DNA, 65 bp, Mus musculus
ttgttctctgtgggaggtttgggagttgactgttgcacggttggagagtacgtgtaaaaggctcc

SEQ ID NO: 26795 - DNA, 65 bp, Mus musculus
ccaaaatgaagcaggttacatacaacatagagcatcatggttgtccactgctgtgaggagagact

SEQ ID NO: 26796 - DNA, 65 bp, Mus musculus
caaaactgaagagttacaaccattgtcagtgcctcgtttcattaggccttgtacaaagagccggg

SEQ ID NO: 26797 - DNA, 65 bp, Mus musculus
aatgacagctatcttcggtcatccttgaggtcaacagcatcatattgctccagggacagtcgggg

SEQ ID NO: 26798 - DNA, 65 bp, Mus musculus
ggcagctttggccatcacaccttatgcacacaagttctgaagagtttgtgaaggctactgctgca

SEQ ID NO: 26799 - DNA, 65 bp, Mus musculus
accaccgtgcgcctacctggacctcgagccttcgccttcggactccgaggattcggagagcctgg

SEQ ID NO: 26800 - DNA, 65 bp, Mus musculus
cagagtgatcaacatgaaagaatcctgaaaggaagaggccactggagggagtcaggcttaaggct

SEQ ID NO: 26801 - DNA, 65 bp, Mus musculus
aggacaaagcttcagcgggactagaggggagttgggataattccgacagactccgaatgcagatt

SEQ ID NO: 26802 - DNA, 65 bp, Mus musculus
acgccaggacaagccttccactcttaggacagagttgaacgtggctctgtggacctagaggaagg

SEQ ID NO: 26803 - DNA, 65 bp, Mus musculus
ctagttctgtacaagacgagaccaatgacaacatcacaatattcaccaggatcttggacggactc

SEQ ID NO: 26804 - DNA, 65 bp, Mus musculus
ggataacaacgcctaatcgcctgctgcggatttggagtgatggaagggttctctatactcttcga

SEQ ID NO: 26805 - DNA, 65 bp, Mus musculus
aggaaaatgctgaagaggggtatcaatggtctccaagatcaagaagacctcagtgtccctggagg

SEQ ID NO: 26806 - DNA, 65 bp, Mus musculus
gcactttctaagtccaacgatataatcccctatgtggtcaccgaatgtgtttctctgtctcaacg

SEQ ID NO: 26807 - DNA, 65 bp, Mus musculus
gctaaccgggcagaggtgcctctgagttggtctgtgtccagcaaactgaaccaacatgcagaatt

SEQ ID NO: 26808 - DNA, 65 bp, Mus musculus
aaaattgtgggtggagcaccacgcctttatcccaataaatcggttggaggaacccccttttccgg

SEQ ID NO: 26809 - DNA, 65 bp, Mus musculus
gctgctctgagggatgactgaagagtacttgattcatgtgtttccactgtccccagacaaagtag

SEQ ID NO: 26810 - DNA, 65 bp, Mus musculus
gaatggtagaagcaacaggcatgacttgccaagcacggagctcttacatggatacagaggtgctc

SEQ ID NO: 26811 - DNA, 65 bp, Mus musculus
gacatgtgcgttgtcacattttccattgcttaatcctggtttggtgcaagtctgtctgcgcctgt

SEQ ID NO: 26812 - DNA, 65 bp, Mus musculus
aacatgaggacctcctgaccttaatcttgagctccggacttgactcagtgtgtggcttccagcaa

SEQ ID NO: 26813 - DNA, 65 bp, Mus musculus
tgcgagctgtactaagcacttactctagggcataacaaacaccagcctacaggcccaatccttta

SEQ ID NO: 26814 - DNA, 65 bp, Mus musculus
ccactgaggacagggcaaactacctctgagaatggaggctcactgttctgcatcccacttctaaa

SEQ ID NO: 26815 - DNA, 65 bp, Mus musculus
ctggggctatttgaaagcaagaacaaaccactgtctctgcttctgcttctgaaacgagaatcggt

SEQ ID NO: 26816 - DNA, 65 bp, Mus musculus
gccctgcctttcggacaccccttgctgctcagacctctaataaaactcggttttccttcttgaaa

SEQ ID NO: 26817 - DNA, 65 bp, Mus musculus
tgacagaagaagagctgatggaccaactggagcaatgtgagctgagcccattggcttcctctcgg

SEQ ID NO: 26818 - DNA, 65 bp, Mus musculus
ggcaagatgaagccccagtacaagtggctgaaggactcactttgcctcaatttctgttgaaagaa

SEQ ID NO: 26819 - DNA, 65 bp, Mus musculus
caggttcattgtacacatctcaggctggcctcaaactccaagacatccaagaaaccctattaatc

SEQ ID NO: 26820 - DNA, 65 bp, Mus musculus
tggaccctagctaagaacaacagaatcctctttcctgccttccagagactgatcccaagcagggc

SEQ ID NO: 26821 - DNA, 65 bp, Mus musculus
acgactgttctcaccatgaccacactcagcaccatcgccaggaagtctctgcctcgggtgtccta

SEQ ID NO: 26822 - DNA, 65 bp, Mus musculus
tcgatttgtgcccagtgataagtcagcattggaggcgatgttcacagcaatgtgtgagtgccagg

SEQ ID NO: 26823 - DNA, 65 bp, Mus musculus
ataagctgtaccagcggaaagagcctgttatcagctccgtgcacaccaaggtcaaaggcatagca

SEQ ID NO: 26824 - DNA, 65 bp, Mus musculus
tggccacggcagacactgtccccatagtagaggccacaggaagaccgtcgtggagaagccccgat

SEQ ID NO: 26825 - DNA, 65 bp, Mus musculus
tactgctacaagaagattgctgctgctacggaggctgctgcacaagagaacgcctcagaatacct

SEQ ID NO: 26826 - DNA, 65 bp, Mus musculus
ggatgtgtgagctcatccagggtcaaaagcaaggcttccaagaagatgcagagatgaacaagaga

SEQ ID NO: 26827 - DNA, 65 bp, Mus musculus
gacgctggcttcctgcagatgcatgacttcttccaacaggacctaaaggaaggtttccatgtcag

SEQ ID NO: 26828 - DNA, 65 bp, Mus musculus
gagctttgctcatttttgtatccttccgttctagcccagtatcccacttggaccaggtaggcaga

SEQ ID NO: 26829 - DNA, 65 bp, Mus musculus
ggaggttgattgtgccacagtgtacattggttcagtaggcattgacgctttgactctgggactga

SEQ ID NO: 26830 - DNA, 65 bp, Mus musculus
atcccgctcacactagtcatgttccagagcctgggtgaacgcatcaacaccttcgtgaggtacct

SEQ ID NO: 26831 - DNA, 65 bp, Mus musculus
tgacgaagcagatggaatccctgaaatactgcaaagatggcacttacatcatgtgagacgcagcc

SEQ ID NO: 26832 - DNA, 65 bp, Mus musculus
ttctggacactctgttctgatgtttacgtgggaaccttgaagctcgtggtagcccctgatgctga

SEQ ID NO: 26833 - DNA, 65 bp, Mus musculus
tgcctaagatgcgcaggttgatcactcgaggtgaatggcagtctgaagcacaggacacaatgaaa

SEQ ID NO: 26834 - DNA, 65 bp, Mus musculus
ttacatccgatccaagaagctggagcactcccacgaccctttcaacgtgtacatcgagtcagatg

SEQ ID NO: 26835 - DNA, 65 bp, Mus musculus
aaggaagtaaccagcccttgtgccctgtgttccccaccccaatagccatgcatcttcagccaaag

SEQ ID NO: 26836 - DNA, 65 bp, Mus musculus
cgtcagcttccacagaagcgaggcacgccatgtttccctgattctgatggctgcacatcaatcat

SEQ ID NO: 26837 - DNA, 65 bp, Mus musculus
ccaggaatccgaatcttgaactgcctatgttattgtcctacaagcatattgaccgtggttgcagc

SEQ ID NO: 26838 - DNA, 65 bp, Mus musculus
caggagaccctgagtgactgggactctcagttcactttcaagtatcatcacgtgggaaaactgct

SEQ ID NO: 26839 - DNA, 65 bp, Mus musculus
tcctctgcctggtggactgctctgtgagcctcaccagcttgtagaggtagagggagtagacccca

SEQ ID NO: 26840 - DNA, 65 bp, Mus musculus
tctcaccacccgatctagagacaaagaccaatccaacttcttcgtcgacatgctctatgggcagc

SEQ ID NO: 26841 - DNA, 65 bp, Mus musculus
gcatggagctgttacacaggaggaaatagtccgcgcttatgataccaccaaagagaattcaagga

SEQ ID NO: 26842 - DNA, 65 bp, Mus musculus
ttgatgctgttgtcgcaaggcacagtgaagagaacatggacaagaccattctagtcagaaatgaa

SEQ ID NO: 26843 - DNA, 65 bp, Mus musculus
catgatctccatctgtgggccctgacgcttacttaccacgttgcctctgcacacctggctattga

SEQ ID NO: 26844 - DNA, 65 bp, Mus musculus
ttctgcttgatatacgcgtccactgaagtgaggctgaccattgagttttcttgtagcatgacccc

SEQ ID NO: 26845 - DNA, 65 bp, Mus musculus
gggctgggaagtgtcttgcaattgtctggaagtagtttacagatggataagcaggatggtgagtt

SEQ ID NO: 26846 - DNA, 65 bp, Mus musculus
cccgtcagtaagggcaatccatgatgttaaagccacagatttgggattagggaaagtcagattta

SEQ ID NO: 26847 - DNA, 65 bp, Mus musculus
ctgcgtgtttcgtggctgtagcacggctcttgtccaccctgctgcctttggattgcatttcaagt

SEQ ID NO: 26848 - DNA, 65 bp, Mus musculus
ctgtcctcggctgctgggttaccatgtgagattgatcctgccttagtcgtagctctttcctcaca

SEQ ID NO: 26849 - DNA, 65 bp, Mus musculus
atctagagaagaaggccaggaggactaaagctgaaggcagtctccctgctgtggtgatagagatt

SEQ ID NO: 26850 - DNA, 65 bp, Mus musculus
atgaaaacggcatcgtctcacagtctgaagtcatcagagcctatgacaccacgaaacagaggccc

SEQ ID NO: 26851 - DNA, 65 bp, Mus musculus
cccacagtggacacagtcaagatcagagagaaacacgagcatcactctcagttttcagagagaac

SEQ ID NO: 26852 - DNA, 65 bp, Mus musculus
atgtttgggaactggaccttcgggacgctggtgttcactgtgatggtgctcactgtcacactgaa

SEQ ID NO: 26853 - DNA, 65 bp, Mus musculus
ttccaggtctgcattggctgcttcctgtgctactgcccagggatgcctaacatcttcaacttcat

SEQ ID NO: 26854 - DNA, 65 bp, Mus musculus
acttcctacagcaaaatgggtacactccttatgacaggttctgtccattctacaagacagtgggg

SEQ ID NO: 26855 - DNA, 65 bp, Mus musculus
cgtcgcaaggaggaagaacacatgatagactgggtagaaaagcatgtggtgaagagcatttctgt

SEQ ID NO: 26856 - DNA, 65 bp, Mus musculus
ccaccctcgttgattgccttacgattcagccaaatggttctgtaagatacacctcttcctcatgg

SEQ ID NO: 26857 - DNA, 65 bp, Mus musculus
tacaaaatccatgtggtaatttgtcatgaattagttgtacaactaatcaaaaaattcaaataaac

SEQ ID NO: 26858 - DNA, 65 bp, Mus musculus
gcggggcgtattttattggaaacttggttccactatgctttgggaatcccttggcgggtgttttg

SEQ ID NO: 26859 - DNA, 65 bp, Mus musculus
tcatcaccttggtcagctgtctccccctctatgtcctcaagtacctgcggagacggttctcccca

SEQ ID NO: 26860 - DNA, 65 bp, Mus musculus
gggagctgaagcctgcccgagtgtatgggacaggttctttggctctgtatgagaaggctgatatt

SEQ ID NO: 26861 - DNA, 65 bp, Mus musculus
ctcttcagaaacaaagtcatctgggtggggatcatctcgcagatcatggttgccttggtcctctt

SEQ ID NO: 26862 - DNA, 65 bp, Mus musculus
aaaacccagaggtgcccttccctcgggacatgatcgacttagaggccaatttcgagaagattgaa

SEQ ID NO: 26863 - DNA, 65 bp, Mus musculus
atgttgccttcatcacaaccgtgaccttcttgtggaaagtgtcagccatcactgtggtcagctgc

SEQ ID NO: 26864 - DNA, 65 bp, Mus musculus
tcgcgaatggcacagaccatcatgaaggctcgattaaaaggagcacagactggtcgaaaccttct

SEQ ID NO: 26865 - DNA, 65 bp, Mus musculus
agctggataatgatgcgggatttcacccccagtggcattgccggagcctttcggagagggtatga

SEQ ID NO: 26866 - DNA, 65 bp, Mus musculus
aatgaccaggctgtctactgacaagaagaagcagtttggaccacttgtgcggtggcttaaagtga

SEQ ID NO: 26867 - DNA, 65 bp, Mus musculus
tttgtgaagcttaaggaacaggaatgtcgcaacatcgtatggattgctgagtgcattgcccagcg

SEQ ID NO: 26868 - DNA, 65 bp, Mus musculus
gtgcaacagtgacattcaagttcattctggctagtcgcttctatccagtgtctgcccgatattgg

SEQ ID NO: 26869 - DNA, 65 bp, Mus musculus
atccaaagatgtagtggactatagtgaagaaaattttgccattgtgtttgctgctatgggagtaa

SEQ ID NO: 26870 - DNA, 65 bp, Mus musculus
gctgtagcaacggctaaagggtcaagctcttagctctatggagtgactaactgtttgggaaaccc

SEQ ID NO: 26871 - DNA, 65 bp, Mus musculus
aggaaggagctaggactgggactcctgcacctgtgagccaggctgaggctaccagtactggagag

SEQ ID NO: 26872 - DNA, 65 bp, Mus musculus
atttgaaagcagacgatggactgagaccaaactgcaaaacatcccagattaccacggccatcatc

SEQ ID NO: 26873 - DNA, 65 bp, Mus musculus
acaaactcgtgataaggggagcttgacggactggagagactttctgctctgacagtagaggtgga

SEQ ID NO: 26874 - DNA, 65 bp, Mus musculus
caagctcgcctacattttgcaagacagaattgaacatggcttgcaacagtacccagagtgacaca

SEQ ID NO: 26875 - DNA, 65 bp, Mus musculus
agacctggaacgggaggctgctggcagcgacctttaccctcattggtgtctcgttctttgctctt

SEQ ID NO: 26876 - DNA, 65 bp, Mus musculus
ctcgttatgggagtcccaaaagacagctccagttttacaggaatctgggcaaatctggccttcgg

SEQ ID NO: 26877 - DNA, 65 bp, Mus musculus
gcaggcaagcctcagtttgggtacatgacttacctggaatgcttctctttaggggaacaagagtg

SEQ ID NO: 26878 - DNA, 65 bp, Mus musculus
tcggaggctgatgtatacccatgggcaaggaggtgacttcttggggtagggttgctcaggagtta

SEQ ID NO: 26879 - DNA, 65 bp, Mus musculus
tcaaggtggaaaagcaggtgcagtccatcgaacataagttggatctgctgctgggcttctactcg

SEQ ID NO: 26880 - DNA, 65 bp, Mus musculus
aacgagttcctgctgcttatcatcttcctggccctgggagtgctcatctttgccaccatgatcta

SEQ ID NO: 26881 - DNA, 65 bp, Mus musculus
ccttgggatcactgtgagttttgcacatggagagatacagactgctggcataggtcgtctctaac

SEQ ID NO: 26882 - DNA, 65 bp, Mus musculus
ggcaactccacagccacttgcaccacgaacaataaccccaactcctgtgtcaacatcaagaagat

SEQ ID NO: 26883 - DNA, 65 bp, Mus musculus
caggaagagcccggattgtaccttctactgtgccgattctgagaagcagaagcttgaagaacagt

SEQ ID NO: 26884 - DNA, 65 bp, Mus musculus; identical to SEQ ID NO: 23716

SEQ ID NO: 26885 - DNA, 65 bp, Mus musculus
tagaaaagtgtcacctaaaggccaagagcaacgtggacctgcgaaggtctctgtatgccctctgt

SEQ ID NO: 26886 - DNA, 65 bp, Mus musculus
tacctacaaagagtctctcaaggacctaagtgctggctgtgttcagaagcatcctgcagttgggg

SEQ ID NO: 26887 - DNA, 65 bp, Mus musculus
gttctcaagtggatcttctcagcaaagccggttctctctcagcttctgtttctgtagaactgggg

SEQ ID NO: 26888 - DNA, 65 bp, Mus musculus
gtcaatgtatcagctgtgggcagatgggccatgctgtatcacacggaagacactcgggatcaaaa

SEQ ID NO: 26889 - DNA, 65 bp, Mus musculus
ccattttcctgacattggtccatcccttcctggtgtaccgtgagtgccgtgctgagaagacaaaa

SEQ ID NO: 26890 - DNA, 65 bp, Mus musculus
agatccaggcagttagtgatgctgcccactgtggacatgtggctcaccctgggttcagggcatta

SEQ ID NO: 26891 - DNA, 65 bp, Mus musculus
cctgtgacccagtgcattatctgtccctggatctctttagtgtctttccactgagcttacccact

SEQ ID NO: 26892 - DNA, 65 bp, Mus musculus
tgacgccgcaaacggtggtggaaatagatgcgctcttggggaacaaatcgcattccaagaagtag

SEQ ID NO: 26893 - DNA, 65 bp, Mus musculus
gaatgaaaccttgcaggtcctgccacagaagcaagaagcagaggaaaggccatggagagacttaa

SEQ ID NO: 26894 - DNA, 65 bp, Mus musculus
aggtttgtgatcaccaggccatccaatgagtgccacctgctgccctcagatctcgtgttttgtgc

SEQ ID NO: 26895 - DNA, 65 bp, Mus musculus
taggacagaaacccaaggctgtagtgtgctgtgcttcctcaagttacccagcggtcatagaccaa

SEQ ID NO: 26896 - DNA, 65 bp, Mus musculus
ttcctctgttcaacaaagagaaagttcaagttagcttcagtccttcagtgataggcaacctaggt

SEQ ID NO: 26897 - DNA, 65 bp, Mus musculus
gggtcatgcaccttccttacttagcttctggtcacttggtcactggcagaatctggagaatggaa

SEQ ID NO: 26898 - DNA, 65 bp, Mus musculus
cacgcgtcggctaggctgtgccttccagcaaaagtcccagagtgagcagaacaggccgctggcct

SEQ ID NO: 26899 - DNA, 65 bp, Mus musculus
tggcgaaggccaagcccaagtttagcatctctccagattccttgtcctgagttgcagttcctcag

SEQ ID NO: 26900 - DNA, 65 bp, Mus musculus
gaacagacccagctgacacaaaacgcagtcagttgtccatacctaccttctaatttgctcaagaa

SEQ ID NO: 26901 - DNA, 65 bp, Mus musculus
aagagtctccacgggagtaccagccccaagttcagccttggagctagaacagaaaagaaccactt

SEQ ID NO: 26902 - DNA, 65 bp, Mus musculus
acatttctaccctcttgcaacggtgtaggaccagacaacaagtgaggaagagagttggtgagaag

SEQ ID NO: 26903 - DNA, 65 bp, Mus musculus
ttcctaaagggaaacaggaagagtctggggtttccaccctcagccctgaatccagagaccatcag

SEQ ID NO: 26904 - DNA, 65 bp, Mus musculus
ggaaggccctacagatggctggaagtacagcatccaaggacgtcaacatcttcagcttcctatcc

SEQ ID NO: 26905 - DNA, 65 bp, Mus musculus
ccgatttgccaccaaagcttcaaaagatggctggaggacctaccaggatggaaggaaatcttcca

SEQ ID NO: 26906 - DNA, 65 bp, Mus musculus
tagctacaggatcgtcaatgtggactccaaatatccaggctatcctccagagcatgccatcgctg

SEQ ID NO: 26907 - DNA, 65 bp, Mus musculus
agctgcatgggtaaagtcatgatgggtaggcagtgcagaacggccttaccagccactcttttcaa

SEQ ID NO: 26908 - DNA, 65 bp, Mus musculus
agtctgtctcattcctcccactcctcacagtcgtccagtaagaagagctcctccgtccactccat

SEQ ID NO: 26909 - DNA, 65 bp, Mus musculus
gctgatgctatggggtgtgtgaagatgccgggatattactccaattgcaagagttgaccctgtgt

SEQ ID NO: 26910 - DNA, 65 bp, Mus musculus
aagagtactgcatggcggtgtgtggcagcgtgtcaacccaaagtttactcaagactaccagtgaa

SEQ ID NO: 26911 - DNA, 65 bp, Mus musculus
ggccatgttgttagcagtagagaccttctcagagctgcctcaggtccgtgccatggtgaaattct

SEQ ID NO: 26912 - DNA, 65 bp, Mus musculus
tgaaggacgacaaggacttcacgggcaccatccaccgcatcgacaacaccacagtcatctatact

SEQ ID NO: 26913 - DNA, 65 bp, Mus musculus
aagactacgtgtcacgagttcacagacgagctaactttcagtgaggcccttggagcagtctcact

SEQ ID NO: 26914 - DNA, 65 bp, Mus musculus
tcactgtgtcctgatgactgagagacaatccggagacagttcattgagttccgatgatcaaaata

SEQ ID NO: 26915 - DNA, 65 bp, Mus musculus
tcagcgcgagtttgaggacttgctgagtagcgttgacggggtatcggatgtgtctctggaaacat

SEQ ID NO: 26916 - DNA, 65 bp, Mus musculus
tcatccctgccctagagggagagctgcatgggacataagccctagattgcttttgcaatgtttag

SEQ ID NO: 26917 - DNA, 65 bp, Mus musculus
tagtcttacacacagatgccgggcgtctcttttgtatcttctatgcactggtggggatcccactg

SEQ ID NO: 26918 - DNA, 65 bp, Mus musculus
ctaagcactgtagggatcttgggtctccataggcatgtctctgaccctggtcttccgggaaagta

SEQ ID NO: 26919 - DNA, 65 bp, Mus musculus
gaccttcaaagaagttaggccattcaccgcatcttaaacttggagttcagtgtaacattgcaaac

SEQ ID NO: 26920 - DNA, 65 bp, Mus musculus
tcctgcagaaggaccggaccaagaggctgggtgccaaggatgactttatggagattaagagtcat

SEQ ID NO: 26921 - DNA, 65 bp, Mus musculus
acagcctccaccgatgcatgtcactggtcatggtgtcagagctgaatagggacatccttgagaaa

SEQ ID NO: 26922 - DNA, 65 bp, Mus musculus
tctaaatcacctggaggtcacacaccaggggatgcaggttgattctttgcaaacactgtcgcttt

SEQ ID NO: 26923 - DNA, 65 bp, Mus musculus
tgtcctataacagacacaacctgacggcagacacaagcgagaggcaagccaaggagatcctgatt

SEQ ID NO: 26924 - DNA, 65 bp, Mus musculus
tgtacaagcctcggcaggagtacaagcatctctatagtcggcacgagctaacacccaatgaggat

SEQ ID NO: 26925 - DNA, 65 bp, Mus musculus
attgggaagaaccatgagtggaactgggctttcatctgcttcactctgctcttctgccagatctg

SEQ ID NO: 26926 - DNA, 65 bp, Mus musculus
ataagataacgcagcaacagaaggccgtgagtgtgcctgagttacttgcagatgttggcggtcag

SEQ ID NO: 26927 - DNA, 65 bp, Mus musculus
aacttttcctagagattgccccagtctcaccccatctgcaggactccttgctacctatgtcccag

SEQ ID NO: 26928 - DNA, 65 bp, Mus musculus
attcgtgtgtttgcctacatcctgtatgtgtgctctccggtgaagaggaagatgctcgtgtctcc

SEQ ID NO: 26929 - DNA, 65 bp, Mus musculus
gactgcccatactcagaaaaggtccccagtattaaaattccaatggacatcatggaacagcaacc

SEQ ID NO: 26930 - DNA, 65 bp, Mus musculus
gcttactatatccccttcaatcatgagcacatcacagccaacttcacccaatactgagacggagt

SEQ ID NO: 26931 - DNA, 65 bp, Mus musculus
gggcaacggatgaaagtcacacaactcagtctgcttgaaccaggggaagtctatgatgtttatcg

SEQ ID NO: 26932 - DNA, 65 bp, Mus musculus
gaagctcatggtgagacctgagcatcctgctagccttgccttacagtgtgtggtgtatctgcaga

SEQ ID NO: 26933 - DNA, 65 bp, Mus musculus
gacctgccattcatgtactagcaccattgaaggaaaagttggaaagctgcaaggtgttcagcgca

SEQ ID NO: 26934 - DNA, 65 bp, Mus musculus
atccacagacctcctactacgctgtggctgtggtaaagaaggaacgagacttccagctgaaccag

SEQ ID NO: 26935 - DNA, 65 bp, Mus musculus
aagaagtcctgccacactggggtagacagaaccgctggttggaacatccctatgtgcatgctgta

SEQ ID NO: 26936 - DNA, 65 bp, Mus musculus
caggtgtctcgttgagaaaggagatgtagcctttgtgaaacaccagactgtcctggataacaccg

SEQ ID NO: 26937 - DNA, 65 bp, Mus musculus
atccctggttctctcgaactgtgagagccaaggcctaggctgccattttgccattgttctctcga

SEQ ID NO: 26938 - DNA, 65 bp, Mus musculus
ggcaaggaagacttgatctgggagattctcaaagtggcacaggaacactttggcaaaggcaaatc

SEQ ID NO: 26939 - DNA, 65 bp, Mus musculus
tgggatgctgaagtgattcagcccctgcccatggacagcagtgcatattccttcacagcctttgc

SEQ ID NO: 26940 - DNA, 65 bp, Mus musculus
aagtccttcagcaggtgctgcttgaccaacaggttcagtttgggagaaatggacagaggtgtcca

SEQ ID NO: 26941 - DNA, 65 bp, Mus musculus
tcaacgagaaagttggcatcgcctttgaccacatgaaggtctgctttggagacttcccgacagtg

SEQ ID NO: 26942 - DNA, 65 bp, Mus musculus
ctgtagccgccacaacccatatcaccttcgttcacggtctcgttcctgtccatcatcactcggca

SEQ ID NO: 26943 - DNA, 65 bp, Mus musculus
tggaggctgcagatgacagctggaaagtgctagctggcagagagtcagtgctctcggctggtgaa

SEQ ID NO: 26944 - DNA, 65 bp, Mus musculus
aaaagaggcttttggccccagaacaggtggccttttagggctctccctgataggcttgatagtct

SEQ ID NO: 26945 - DNA, 65 bp, Mus musculus
cagttgattacaatgacagtgaccactcgagcaagaagtcccaccatggaaccactcctggctac

SEQ ID NO: 26946 - DNA, 65 bp, Mus musculus
aggccttagcccagctcgagaaagccaagaccaaaccagtggcttttgctgttcggacaaatgtt

SEQ ID NO: 26947 - DNA, 65 bp, Mus musculus
cctgtgcttcttggaacccacctcagaagccaagtacattcctccagatctctgtgtctgcaatt

SEQ ID NO: 26948 - DNA, 65 bp, Mus musculus
ctttgctgcgagaaggaggttctgaaaccttatccaagaacagaagccatcagccaagtctccac

SEQ ID NO: 26949 - DNA, 65 bp, Mus musculus
actgccacacatcagaaatgaagcaatcagagctcaacatggcggcacttctgtcccatcagctg

SEQ ID NO: 26950 - DNA, 65 bp, Mus musculus
agacgtttgactctgaaacccaagagagccgagactctgcctacgtggagccaaaggaagattat

SEQ ID NO: 26951 - DNA, 65 bp, Mus musculus
agtaaatcctgggagcagaggggagtctccagtgtggccctcagactgagagcatccaggcattt

SEQ ID NO: 26952 - DNA, 65 bp, Mus musculus
agaaagatgcgctgagtctctctggtttgtcttctgacccaacagacctggatccctgagtccta

SEQ ID NO: 26953 - DNA, 65 bp, Mus musculus
tccgaagcagatgagaatgagatgatcaactgcgaagagtttgcgaaccgcttccaggaaccagc

SEQ ID NO: 26954 - DNA, 65 bp, Mus musculus
agctgtgggcttcctcatatttctggagtcagtgtcatccaccgacagttggaaccatcgccaat

SEQ ID NO: 26955 - DNA, 65 bp, Mus musculus
aaacttgagtgatgcaatatggtcccatgtaagtagtggagctgccatgttttaggtcaatctcc

SEQ ID NO: 26956 - DNA, 65 bp, Mus musculus
gcacagccgagaccactaccctctggtggaagaagattacccggactcgtaccaggacacttata

SEQ ID NO: 26957 - DNA, 65 bp, Mus musculus
tctagaagactggtgcagagggatggatatgaatcctcggaaagcactattggttgccggcatcc

SEQ ID NO: 26958 - DNA, 65 bp, Mus musculus
gggctcccaaacgacccttattactcccagatgtgaggcctatacagaatgacacaagcttagaa

SEQ ID NO: 26959 - DNA, 65 bp, Mus musculus
acccagactccgattacaacccaggagaggagtacacttgtgggagcaactttgccattgtctac

SEQ ID NO: 26960 - DNA, 65 bp, Mus musculus
gaacgaaggctcctggttctacatccatccgttctggaagctgagaagcgagggtgataatgaca

SEQ ID NO: 26961 - DNA, 65 bp, Mus musculus
gtggagaaacttgaagcaaaagagagacgagaactaccagaaggtgatgtgctgcctggtgcacc

SEQ ID NO: 26962 - DNA, 65 bp, Mus musculus
acagatgtgctggagtctgatcctaggccctggctgactaatccttctatccggaggacattctt

SEQ ID NO: 26963 - DNA, 65 bp, Mus musculus
aaagttgctcgtgaggaccttgctaattgtgggctgcatcctaaaaccctggagcagctcagtca

SEQ ID NO: 26964 - DNA, 65 bp, Mus musculus
caatgtcatcccaagccccaagtccctgtggtacctggtcaagtggatatggacacacttatgta

SEQ ID NO: 26965 - DNA, 65 bp, Mus musculus
ttatatggcaccaacactgcgtgctttggccattgtccacaccatcatctctctggtctgtgtgg

SEQ ID NO: 26966 - DNA, 65 bp, Mus musculus
atcactgtcagggtgggtacggctcattggttctgatttgcccactaagggtacatgtgcgctta

SEQ ID NO: 26967 - DNA, 65 bp, Mus musculus
tggtggcctttctctgcatcattggctacaactgtctcaaggtgccccttgtcatcttcaagcgg

SEQ ID NO: 26968 - DNA, 65 bp, Mus musculus
agcagaaagtgacggagcacattcctccgtatgacgtcgtgccgtcaatgcgtcctgtggtgtta

SEQ ID NO: 26969 - DNA, 65 bp, Mus musculus
tgagaaagagtgcagtttctcccttgtgcttgaggaaccaaaatggctaagaagaggattgaaag

SEQ ID NO: 26970 - DNA, 65 bp, Mus musculus
ggcagagctgaaggagcagatgacagaacaaaggaaaaacaagcaaaggctgggctttcttggat

SEQ ID NO: 26971 - DNA, 65 bp, Mus musculus
cacatttatgggcacatgtagtggggacaagatggactgtgtctctgaggtctcagtgcctgaga

SEQ ID NO: 26972 - DNA, 65 bp, Mus musculus
ttacaaaccaaagggctttagggaggacgttagggttatagctgtggactgaagagttgccttcc

SEQ ID NO: 26973 - DNA, 65 bp, Mus musculus
gggctcaccttcacccaaaagtggaatacagacaatactcttgggacagaaatctcttgggagaa

SEQ ID NO: 26974 - DNA, 65 bp, Mus musculus
tgctgccagagaccttgggccagccgctgcctgatacagtgcaggacctgaagagcaggagcaga

SEQ ID NO: 26975 - DNA, 65 bp, Mus musculus
attttcatgccagcaaagcaccatcctgagcagccctacgtgaccaaggtgaagacatggcggat

SEQ ID NO: 26976 - DNA, 65 bp, Mus musculus
tgaaatgtctggatgctaatgaggcagagccagtgtttgacgagtgtgaaggtgtggatgagtac

SEQ ID NO: 26977 - DNA, 65 bp, Mus musculus
aaacattctcgctgtctatgacttagcaggccaatccccaaagcactctcctggtgtctctagag

SEQ ID NO: 26978 - DNA, 65 bp, Mus musculus
gatcgtctcacactggactacagggcgcggactgctgcagctcaacctggaacctaccggcgaga

SEQ ID NO: 26979 - DNA, 65 bp, Mus musculus
tcatactcacctatgtgctggcagccctggagctaacgtgtctcttcatgcagttctccatccta

SEQ ID NO: 26980 - DNA, 65 bp, Mus musculus; identical to SEQ ID NO: 23716

SEQ ID NO: 26981 - DNA, 65 bp, Mus musculus
gcaaaggtcaacaactctagtttaattggagtgggctatactcagactctgaggcctggtgtgaa

SEQ ID NO: 26982 - DNA, 65 bp, Mus musculus
ccctgttcccatcgtgccctgttcccatcctagcccatcacttaacctgttttacaccaaaagta

SEQ ID NO: 26983 - DNA, 65 bp, Mus musculus
cactgtcatgtctctagctgggaaatacacactgaacaactggttggctacagtaacgctgggcc

SEQ ID NO: 26984 - DNA, 65 bp, Mus musculus
aggaatcgtgcgggagctgaaaagtcgaggagtggcctacaaatccagagacacagcaataaaga

SEQ ID NO: 26985 - DNA, 65 bp, Mus musculus
gagtcggattcccctggttcgatcctttgcagatataggcaagaaacattctgaccctcacttgc

SEQ ID NO: 26986 - DNA, 65 bp, Mus musculus
atcaccttctagactgcttcatctacgaggatcagattcggcctcaggaccgagaagaactgctc

SEQ ID NO: 26987 - DNA, 65 bp, Mus musculus
gacagtgatgacaagtgccagtgaaccccttacggatggcctgtattccttctgcaagcagcagt

SEQ ID NO: 26988 - DNA, 65 bp, Mus musculus
cacattgaggggttctttcatcagtggactgtgttctttagactaggtagctctgggaagtacct

SEQ ID NO: 26989 - DNA, 65 bp, Mus musculus
ttggtcagtgttttcctagggattctaaggctgtgtctgtgaaagggcatggacatccactggtg

SEQ ID NO: 26990 - DNA, 65 bp, Mus musculus
ccttccgtgagaagcaaggactggattcctcttcaaacagttgtacagcctgatgtaggacttgg

SEQ ID NO: 26991 - DNA, 65 bp, Mus musculus
tcaaaatccctgatctaaccgatgtgaatgccatagacagatggtcccgcatcgtgtttccattc

SEQ ID NO: 26992 - DNA, 65 bp, Mus musculus
ccactcagcagagaagaacgctccatattcacactccgatccctgaaggagctgagagtaaatga

SEQ ID NO: 26993 - DNA, 65 bp, Mus musculus
tgacgatattcctgaccgtccagcaggcgttggagtatattcagctatctggcagttgtgcctag

SEQ ID NO: 26994 - DNA, 65 bp, Mus musculus
gacctgcatttgctaactcatggaaatacaggcagaaaacatcccgtgccaaaagagccattgcc

SEQ ID NO: 26995 - DNA, 65 bp, Mus musculus
ttcacccaaggctacttatgtgcaagacagtcctgctgagaccaagacctacaacagtgtcagca

SEQ ID NO: 26996 - DNA, 65 bp, Mus musculus
tgcatcgccaagtcatgctcggtgtccgaaagcacaagtgtctcagccaatttcttgctaagcac

SEQ ID NO: 26997 - DNA, 65 bp, Mus musculus
agctgaagaaagccatttccaccttgatcaacccaccagcccccaagtgagccgtgtgggggtcg

SEQ ID NO: 26998 - DNA, 65 bp, Mus musculus
gatagaccaacagcaaccaatcacactactactagcacacagacccactcacgatctcgcacatg

SEQ ID NO: 26999 - DNA, 65 bp, Mus musculus
tcgggctggatcctaggtggacacttggtacctctctgttgctgtttcttggagagcccagctct

SEQ ID NO: 27000 - DNA, 65 bp, Mus musculus
acagactctcaccttgactgtcacctcccgtgcagcaagtgctacactgcctcctattacagtga

SEQ ID NO: 27001 - DNA, 65 bp, Mus musculus
agaccctttgtcctgggcagttggtttcagtcatcagcactttccctattccctgaccctccagg

SEQ ID NO: 27002 - DNA, 65 bp, Mus musculus
tcagcctccacagcctcatcctcgatttttcagcagtgtctttccttgacgtctcctcaatgagg

SEQ ID NO: 27003 - DNA, 65 bp, Mus musculus
ggggtgtcattctcaggagctggctgcaggttaggagttgagtagtttcttcagaaaaggacttc

SEQ ID NO: 27004 - DNA, 65 bp, Mus musculus
ctgtgtcctctacgacaatgtggtctacagatacctgtacgtcagcatcgccattgcgctcaagt

SEQ ID NO: 27005 - DNA, 65 bp, Mus musculus
tacagatgacctgaccataactcccactgatacacgctgggtcggtgcttggtggattggctttt

SEQ ID NO: 27006 - DNA, 65 bp, Mus musculus
cacaggaaaggtttccctgtaaaagcctcaattgcatttctactgtcacctgggcacttgtgttc

SEQ ID NO: 27007 - DNA, 65 bp, Mus musculus
ttcgaaaccttgctttctctgctgtgttgtcaccagacccacacatacttgggacagagtccgtt

SEQ ID NO: 27008 - DNA, 65 bp, Mus musculus
agagttcttcgactctctcaatgaagccatcatgagattggtagcggtgataatgtggtatgcac

SEQ ID NO: 27009 - DNA, 65 bp, Mus musculus
gtgccagctgttagctttcagtactgtgaaatgcaacaaagtccaacctctctggaactgccttc

SEQ ID NO: 27010 - DNA, 65 bp, Mus musculus
cacagaggacatcacactgatcatagctgtggattggttccttgaccgacttcgtacaatgacca

SEQ ID NO: 27011 - DNA, 65 bp, Mus musculus
tgctcaccaaggtgaaggggtcgtagctgctggacttgaagatgctggcctgtcttcgttctccc

SEQ ID NO: 27012 - DNA, 65 bp, Mus musculus
tcctgtttactggggagctctgggagttcttgagcttcgccgagaggtacccgaccatcatctat

SEQ ID NO: 27013 - DNA, 65 bp, Mus musculus
gagacacaagagctgtggtcaaggctacaggtgaagatcccggatctgtttgcgggtatagagat

SEQ ID NO: 27014 - DNA, 65 bp, Mus musculus
gcaagctaatatgcaagtcatacagtgaggcaagctcacagttcttgagtctagtgcctatctgc

SEQ ID NO: 27015 - DNA, 65 bp, Mus musculus
tgtgatgcgattcacaaggaaagatctagagaggcccatcaaggtgcccctcttcatccctatca

SEQ ID NO: 27016 - DNA, 65 bp, Mus musculus
cagctcgtgagatcctggtcatttctggacagtcccttggtttactcatctccctctgaacaaag

SEQ ID NO: 27017 - DNA, 65 bp, Mus musculus
ttcatcatcattgactgggtctctgggaccagccagcatggaggaaaccattaggatgacctcca

SEQ ID NO: 27018 - DNA, 65 bp, Mus musculus
gatggcagaacaccggatgtagttgctctcactgtgacattcttcttgtttgaattcctggctgc

SEQ ID NO: 27019 - DNA, 65 bp, Mus musculus
ccatttcacagccattcagtgcttggaatctacagcgtccagccatttccagcaagagcgctccc

SEQ ID NO: 27020 - DNA, 65 bp, Mus musculus
ggcctgaattagcatcaaaccagccttaagtcatctcccatccaagaactgggcctaaagtgctc

SEQ ID NO: 27021 - DNA, 65 bp, Mus musculus
cctagaggaagacactcctccaacatcaggttgatgatcagtagatgtttctggaatcagatgtc

SEQ ID NO: 27022 - DNA, 65 bp, Mus musculus
ctgtttcccattacttcagacctaatcacagctcagcgtctgctccttcatcacagaacccagtc

SEQ ID NO: 27023 - DNA, 65 bp, Mus musculus
tttccatccttccagtctcccggctctgtgagtcaggccagaggtggggcaagagagtgggaggt

SEQ ID NO: 27024 - DNA, 65 bp, Mus musculus
ttttggcgaagactgctatgcattggcttttgggattccaggattgctcatggtgctggcacttg

SEQ ID NO: 27025 - DNA, 65 bp, Mus musculus
ggacaggacactccaccacagagtccctgatggagaaagacctcagaagtgtgagccagaataat

SEQ ID NO: 27026 - DNA, 65 bp, Mus musculus
gggctggatgtactgccccaaggactttgggaacatcaacaactgtcagatggaccgttacttct

SEQ ID NO: 27027 - DNA, 65 bp, Mus musculus
tgtccagcctcaggaatcttgctagctgctgtgacctctataccagcactgtgtgtgcatgaggc

SEQ ID NO: 27028 - DNA, 65 bp, Mus musculus
ccggaaaggggctgatattatgtacacggggacacttgactgctggaggaagattgcaaaagatg

SEQ ID NO: 27029 - DNA, 65 bp, Mus musculus
tgatgtgggcaaagctggagctgaaagggaattcaaaggccttggtgactgcctggttaagatct

SEQ ID NO: 27030 - DNA, 65 bp, Mus musculus
atcgccctctcatccatgatcctggtgcctgcctatgtcatctacaagttcctcagcatacgcgg

SEQ ID NO: 27031 - DNA, 65 bp, Mus musculus
ctgcacattgacttctaccgcctaaaggaggccacggtatggatcgatgctgctactcaaatttt

SEQ ID NO: 27032 - DNA, 65 bp, Mus musculus
gcttgtcacctctcagtcctttccaagtgagctctaggaagctgagtctgccaagtgttttgaac

SEQ ID NO: 27033 - DNA, 65 bp, Mus musculus
agtagcatagaactctgtagccggaatctactagaaccctgtaacccacgtgctgctgtgaggtt

SEQ ID NO: 27034 - DNA, 65 bp, Mus musculus
cccctgatttccacccaaacttaccttatagagcacaacgttaaaggtcgtacaattactgtgag

SEQ ID NO: 27035 - DNA, 65 bp, Mus musculus
gaagtcctgaagaagctcaagagtaaacgcattccgatctacgagaagaagtacggccaagtccc

SEQ ID NO: 27036 - DNA, 65 bp, Mus musculus
caccaagaaggaccagaacctcacacggggcaactggggcaaccagatcgagtttgtactgacga

SEQ ID NO: 27037 - DNA, 65 bp, Mus musculus
tggtcaacatgtccacaggcttggtgcaggaccagacactatggtcagatcccatctggaccaac

SEQ ID NO: 27038 - DNA, 65 bp, Mus musculus
cctcttgcttggactggacagccagtttgttgaagtcgaaggacagatcacatccttggttgatc

SEQ ID NO: 27039 - DNA, 65 bp, Mus musculus
agctcggatattcctaattgccagcaaagagcttgagttcatcacgctgatcgtgggcttcagca

SEQ ID NO: 27040 - DNA, 65 bp, Mus musculus
caaacctgaaatgcatgaagagaaacccatagtatttatgccccctataggcaggtatccacagt

SEQ ID NO: 27041 - DNA, 65 bp, Mus musculus
aggacggggaaaccattgagctgcggctagttagatggtagtcctacgatccctcctgatgtctt

SEQ ID NO: 27042 - DNA, 65 bp, Mus musculus
ggatggacaatcacttcagattcctgaaaggctactggagcaagtttactgacaagttcaccggc

SEQ ID NO: 27043 - DNA, 65 bp, Mus musculus
gctggctgtttgttgctatgaagctaatgctagccagatctgtgaacttgttgctcatgaaacca

SEQ ID NO: 27044 - DNA, 65 bp, Mus musculus
accagaagacatacccgatcagcatggatgagaaactcagggacatgtacagcaaaagctcggcg

SEQ ID NO: 27045 - DNA, 65 bp, Mus musculus
cggctctccacacacctgcgcaagatgcgcaagcgcttgatgcgggatgccgatgatctgcagaa

SEQ ID NO: 27046 - DNA, 65 bp, Mus musculus
agtgttcaatatggagttgaaaatgcaagtcaataatgtataccaaatagtttgtgaaaaattgg

SEQ ID NO: 27047 - DNA, 65 bp, Mus musculus
ggccacctcgaagcatcaaggacatccacgtaatgtgccaggtccctcttcatcacagaccaata

SEQ ID NO: 27048 - DNA, 65 bp, Mus musculus
tttgattcccgtgggttcccttccaccagaacgatatgctatgacgtgcctgacccttgctctct

SEQ ID NO: 27049 - DNA, 65 bp, Mus musculus
aagatcagatcaacacacagacccaggaaatgaagctccagctgaccccatacatccagcgcatg

SEQ ID NO: 27050 - DNA, 65 bp, Mus musculus
aactgaagcaaaagattgccaggcaagctctctcctcggacctccataggcagcaaaggaaccag

SEQ ID NO: 27051 - DNA, 65 bp, Mus musculus
ggtaacaagactctggaccaggtcttagaagatgtagaccagtgctgtcaagccctttcccagag

SEQ ID NO: 27052 - DNA, 65 bp, Mus musculus
agatactctcctgaaagccaacctcatgacagatgacctcccttgccacttcacttctgccttcg

SEQ ID NO: 27053 - DNA, 65 bp, Mus musculus
catttactgtcagctcttgttgccgggttttgcaccacactcctggcctctccagtggatgtggt

SEQ ID NO: 27054 - DNA, 65 bp, Mus musculus
gcttcttactgctccatctcagagcactgagaatggtgacctgatttcctgcaatagtgtctcag

SEQ ID NO: 27055 - DNA, 65 bp, Mus musculus
ggagcctgatagctgggagacactggaccagcaacagttattcaccgaggacgagcttaaagagt

SEQ ID NO: 27056 - DNA, 65 bp, Mus musculus
aagctgcaggctgccaacgctgaggacattaagagtggaaagctgagccaagagctggacttcgt

SEQ ID NO: 27057 - DNA, 65 bp, Mus musculus
tgtgtaacacagtacgattcatgtttattcaaacacaagacaccccaaatcccaacagcttaaag

SEQ ID NO: 27058 - DNA, 65 bp, Mus musculus
gaatgaataggttgtggctgtcaacctctggaaccagaagtgcctgtaagacagtccttcaagtt

SEQ ID NO: 27059 - DNA, 65 bp, Mus musculus
aaaccagttggccctggctacttggactattcagggagtcgcaaatgccctctctggtgacattt

SEQ ID NO: 27060 - DNA, 65 bp, Mus musculus
tggaccctttggtgtcactaatgatggtggagaaggtgccagactcaacctacgagatgattggc

SEQ ID NO: 27061 - DNA, 65 bp, Mus musculus
gctccaggcatcccctccatcacagcgtacagtaagaacggcttgaagatagagttcacctttga

SEQ ID NO: 27062 - DNA, 65 bp, Mus musculus
cacgagtccttcgtgtgctccgtttcggatttagtcacattggctgtatctctacagcgtcttat

SEQ ID NO: 27063 - DNA, 65 bp, Mus musculus
tctcctttgaactccctcggcacacatgctccggtctccaggttcgattcctcagactgtccttt

SEQ ID NO: 27064 - DNA, 65 bp, Mus musculus
agttgatggtgtgaaggacacacctcgctgctcgatcgctctctgcagccattggaacaaccata

SEQ ID NO: 27065 - DNA, 65 bp, Mus musculus
ttctgggtttggactgtgctggaaagacaacagttttatacaggctgcagttcaacgaatttgta

SEQ ID NO: 27066 - DNA, 65 bp, Mus musculus
tagacgtcagaatggggtctgtactcctcaggttcctcccaagactccaggacaatttgcactga

SEQ ID NO: 27067 - DNA, 65 bp, Mus musculus
tagctgggcacaagctgagccttcctcagaggtgacagtggtctacagacattctggcttccttt

SEQ ID NO: 27068 - DNA, 65 bp, Mus musculus
atgctagacaatgctgctttcaccctgtatgagttctggcaggatgaagcctcctggagaaggca

SEQ ID NO: 27069 - DNA, 65 bp, Mus musculus
ttggaacagtgcctgtgggtgcctctgctcagacacaacctgcttcaagtggtcctgctccgttt

SEQ ID NO: 27070 - DNA, 65 bp, Mus musculus
tacatcaagttcatcaacctcttccctgagaccaaggccaccatccaaggggttctgcgtgccgg

SEQ ID NO: 27071 - DNA, 65 bp, Mus musculus
gactgagcactgtcgccagcactgacatcctggcaactgtcctggaggaaatgccacccttccct

SEQ ID NO: 27072 - DNA, 65 bp, Mus musculus
aagacgtcgctggtgctgcgctactgcgagaacaagttcaacgacaagcacatcaccaccctgca

SEQ ID NO: 27073 - DNA, 65 bp, Mus musculus
tatccaatagcatcctttctctacaaccagagcctgagatcccaccagagctgcctcctcccaga

SEQ ID NO: 27074 - DNA, 65 bp, Mus musculus
cgagcatcgtgtggcggtttgtggaagacagttttgatccgaatatcaatccaaccataggggca

SEQ ID NO: 27075 - DNA, 65 bp, Mus musculus
gaagtcacttgggccagaattcaagttcccttaatggtggcgatgtcatcaaccttagacctaac

SEQ ID NO: 27076 - DNA, 65 bp, Mus musculus; identical to SEQ ID NO: 23716

SEQ ID NO: 27077 - DNA, 65 bp, Mus musculus
tgtctgttatgacctcactgacagcagcagctttgagagagccaagttctgggttaaggagctgc

SEQ ID NO: 27078 - DNA, 65 bp, Mus musculus
aaacctccgccaagctgaactaccaggtgtctgagatcttcaacactgttgctcaggagcttctg

SEQ ID NO: 27079 - DNA, 65 bp, Mus musculus
cctgctcctgaggttcacagatgatacctttgatccagaacttgcagcaacaataggtgttgact

SEQ ID NO: 27080 - DNA, 65 bp, Mus musculus
aagtctttgtgctcatggcgaaggagttaattgcccgcaacagcctgcacctgtatggggagagt

SEQ ID NO: 27081 - DNA, 65 bp, Mus musculus
agaagacgagcgactcagagggacagaaacacagacgcaacaagttcagacagaagcagtaactg

SEQ ID NO: 27082 - DNA, 65 bp, Mus musculus
cttactgtgggaaacaaagtctcttgcagacactagcattttaaggtgacaaaggtcagagattg

SEQ ID NO: 27083 - DNA, 65 bp, Mus musculus
ttgaattttcccagttgccactcaaagtggagttcctggagtgtagtgccaagggtggacgaggg

SEQ ID NO: 27084 - DNA, 65 bp, Mus musculus
ctgcagaaccagcacacctcactgatgattgtctgaagaacgtggagccaaggatggttgaactt

SEQ ID NO: 27085 - DNA, 65 bp, Mus musculus
ttgtcgaattgtaaggaaagcaacaatggtatgaggaacagcagagtggggacatcgaggagcct

SEQ ID NO: 27086 - DNA, 65 bp, Mus musculus
gaatatgaaccaaatggcttcgaagattttagaaaatgaacctcagccaaagcgtggcactgact

SEQ ID NO: 27087 - DNA, 65 bp, Mus musculus
tttcctctcatgtggcaaacgtgcgactctgtggtcctgagtgccagaagctgtctccatgggtt

SEQ ID NO: 27088 - DNA, 65 bp, Mus musculus
tttccgttgctgtgtctccctaggaggtaagcaggcagaagctgagaagctgggcttcagtgact

SEQ ID NO: 27089 - DNA, 65 bp, Mus musculus
tttagtgactgcagaagatggtgaaggggctggtgaagcacggagttcaggggatggtacagaat

SEQ ID NO: 27090 - DNA, 65 bp, Mus musculus
tacaagaagatcctgaagtacaagatgctggatgagagggagatgccagctgctgagcagatgtg

SEQ ID NO: 27091 - DNA, 65 bp, Mus musculus
tttgaacgtctggtggacgtgatctgtgagaagatgtcagagtccctggatactgcagaccctgc

SEQ ID NO: 27092 - DNA, 65 bp, Mus musculus
agatcgcagaagggctaaacctccacaccatccgggaccgcgtctggcagatccagtcctgttca

SEQ ID NO: 27093 - DNA, 65 bp, Mus musculus
tcatgatggtagtggctggcttctttaccctctgtgctgggctttcactcttcctcctgcagcgg

SEQ ID NO: 27094 - DNA, 65 bp, Mus musculus
ccgacgccctggctaaggtctttgtatgatgtggcacagcagcttcaccttgtagctctttataa

SEQ ID NO: 27095 - DNA, 65 bp, Mus musculus
gcttggagttatgacctacagtgatacaggaaaactaagtcctgaaactcaatcagccattgaac

SEQ ID NO: 27096 - DNA, 65 bp, Mus musculus
cccaccagacctgtcccagtgactctacctttgttctagaaggcgctcctttcagggttgtggta

SEQ ID NO: 27097 - DNA, 65 bp, Mus musculus
gcttcccttgaacctaaatgcctggatacagagctatcctgacacctttagacagatctgagtgg

SEQ ID NO: 27098 - DNA, 65 bp, Mus musculus
atgcccagcatcttcctcctcagactccttccccaggggaagccttaattcatctccttgacctt

SEQ ID NO: 27099 - DNA, 65 bp, Mus musculus
tgacaccaggaataagtacctcatcttcaccactggctgcctcacgtactcaccgcatcagatcg

SEQ ID NO: 27100 - DNA, 65 bp, Mus musculus
gtcagattgtctgctgttagccgaggggtcatgaagactcttgtgtctatccatggtctgttggg

SEQ ID NO: 27101 - DNA, 65 bp, Mus musculus
tgagtaatagcagtgtaatgttccagttgcacatgagtgtgtcagacaggtaatgtcaggagccc

SEQ ID NO: 27102 - DNA, 65 bp, Mus musculus
gattctttggaatgcagtgtaaaatgtgctgtctaggtgttctctccaacttacccagcaaatgt

SEQ ID NO: 27103 - DNA, 65 bp, Mus musculus
tcagagtgaacagccattacaggtggcaagatgtacgaagataatcaacgctgattcggaggacc

SEQ ID NO: 27104 - DNA, 65 bp, Mus musculus
tataacctaggcatcagctgcatcaacctgggagctcaccgtgaggctgtggagcactttctgga

SEQ ID NO: 27105 - DNA, 65 bp, Mus musculus
cctacctcagtgctcaggatgatactggcggccttttcttagctgaattgctactgaagcctgag

SEQ ID NO: 27106 - DNA, 65 bp, Mus musculus
caatgccatgcccgtgagcgagctgactgacaagctgggccttcagcacctgcgtagccgcacgt

SEQ ID NO: 27107 - DNA, 65 bp, Mus musculus
ggagagacacgttcaaccacttgacaacctggttagaagatgcccgtcagcattccaattccaac

SEQ ID NO: 27108 - DNA, 65 bp, Mus musculus
caagagcagcattgacatcttcctgtatgtggtgggatcttcctccgagaatgagctgatgctca

SEQ ID NO: 27109 - DNA, 65 bp, Mus musculus
ccaagagtgtgatgcattcttgccctagtctttacttgtgtctgctctgggatggatgctgtctg

SEQ ID NO: 27110 - DNA, 65 bp, Mus musculus
ctggtggcctgacttgttggccgagcatgcagagaagttttgggctttattcacagtagacatgg

SEQ ID NO: 27111 - DNA, 65 bp, Mus musculus
gcagacccgactgtctaagtactacgagcatgtggacattaataaacgtgcgcttctggagactg

SEQ ID NO: 27112 - DNA, 65 bp, Mus musculus
ctgttgagaataagtctgcgagagctggaattggctgatgacgtcaaccttgcgagcatagcaga

SEQ ID NO: 27113 - DNA, 65 bp, Mus musculus
aaccgcagactcagtattctgccactcccaactacacgtactccaatgagatgtgagccagccaa

SEQ ID NO: 27114 - DNA, 65 bp, Mus musculus
agcagcccctagtccagcttggtcaagcttactctagagcaggtcagtgagtatcaggtgctgct

SEQ ID NO: 27115 - DNA, 65 bp, Mus musculus
tgagaagatagtccaggctctgtctaactcggtgggagagattcacatgaagaccatgcctgcag

SEQ ID NO: 27116 - DNA, 65 bp, Mus musculus
ggatggagaaggagatggagacctcaagtgaagtgctgacatctttgtggcatgcagctcattcc

SEQ ID NO: 27117 - DNA, 65 bp, Mus musculus
cgacatcagagaccgcacacgatttattaggcagcttattgttccgaacgagaagagtggagcct

SEQ ID NO: 27118 - DNA, 65 bp, Mus musculus
agctcgaggctagaccatcatgggacagacacacagagacactttgccacatctgatacagctgt

SEQ ID NO: 27119 - DNA, 65 bp, Mus musculus
tggagtccgcgttggacaccgcatcattgaggtcaacgggcagagcgtggtggctatgccccatg

SEQ ID NO: 27120 - DNA, 65 bp, Mus musculus
agtccctagaaaagtttctgctcagaactgaggatggaaagagccgtaatgacgttggccttgcc

SEQ ID NO: 27121 - DNA, 65 bp, Mus musculus
tcttcaccggcatcgcagtgctgggaatcgtgatgctgaagcggatccactccctgtaccgccaa

SEQ ID NO: 27122 - DNA, 65 bp, Mus musculus
attgaaattcagcccaagcacatcttctggtctgactctggagagctggtctgtatcgccaccga

SEQ ID NO: 27123 - DNA, 65 bp, Mus musculus
agtggagacaactctcagaacagcaacatagaccagagcttctgggagacctttgggagtgctga

SEQ ID NO: 27124 - DNA, 65 bp, Mus musculus
aacacatggctgctaagctatagcatggaccttaccgggcagaaggaagtagcactgacaccttc

SEQ ID NO: 27125 - DNA, 65 bp, Mus musculus
ctaaaacataatctctcagaggtgatcctctcggagtcgagctcaggagaaggagtccccttctt

SEQ ID NO: 27126 - DNA, 65 bp, Mus musculus
tctggatttgtccctgtccttcctggcctgtcctggaggctggaaaccagtgcaggttgatcctg

SEQ ID NO: 27127 - DNA, 65 bp, Mus musculus
atattactgcttgggactccaagggctggaagtggtgatgggcagatgtgagcccagaggagcag

SEQ ID NO: 27128 - DNA, 65 bp, Mus musculus
cgctagactgccccattttgagagcaccatggaccaaagtgggatggagattcctgtgactctca

SEQ ID NO: 27129 - DNA, 65 bp, Mus musculus
tacccaaagaactcgacccttcgaacttatcaccagaagattgacagcaacctagatgagctgtc

SEQ ID NO: 27130 - DNA, 65 bp, Mus musculus
agaccaagaagcgtatcttccagattcacaccagcaggatgacactggctgatgatgtaaccttg

SEQ ID NO: 27131 - DNA, 65 bp, Mus musculus
ccataatggcgtggaaggctgggtctgcacacactagccaattaaagtcagaatcttgatgcttt

SEQ ID NO: 27132 - DNA, 65 bp, Mus musculus
gaatacccgacgaaagggcccacgtttcaaggcagtgacatttgatagctgagaggaaaagtggc

SEQ ID NO: 27133 - DNA, 65 bp, Mus musculus
agacctgctgcctggcatcgactggctccttgatgacatttccagtcgtgtctttactgccgact

SEQ ID NO: 27134 - DNA, 65 bp, Mus musculus
agctgaccgtcaacagtgagaagatggtgattggcaccatgctggtgaaggatgtgattcaggct

SEQ ID NO: 27135 - DNA, 65 bp, Mus musculus
aggccccaagagggcaacacaaacaagaccgcaaaaacagcgcagacacagccggcatagaaaga

SEQ ID NO: 27136 - DNA, 65 bp, Mus musculus
ggacttaacactatgaagtctgcaaacatatgtataggtcggccagtgctccttaccagtttgga

SEQ ID NO: 27137 - DNA, 65 bp, Mus musculus
agtataatgccgactacgatctgtcagctcgccaaggagcagataccctagccttcatgtctctg

SEQ ID NO: 27138 - DNA, 65 bp, Mus musculus
ttgtgggtcatcgtgcgaactctgggactcgaactcggatcctctgcaaaagcaactagcaggtt

SEQ ID NO: 27139 - DNA, 65 bp, Mus musculus
tgcccagccttgaataccacatttctgccttcttccgcattgttgttgctagcctaggccttggg

SEQ ID NO: 27140 - DNA, 65 bp, Mus musculus
acctccagtctctactctgcgcgactcttcagaatgttctccggaaagtgcagcatcaagatgct

SEQ ID NO: 27141 - DNA, 65 bp, Mus musculus
ccaaccagaaccacatgggtcaaaatcttcaggattcgacaacaccaaatatggagggaaagtcc

SEQ ID NO: 27142 - DNA, 65 bp, Mus musculus
aacgtcagctcctttcctgatgatgctacttctccgctacaggaaaaccggaacaaccagggtac

SEQ ID NO: 27143 - DNA, 65 bp, Mus musculus
aaagaactcgcacagcttgctagaatgaccgatggatactctggaagtgatctgaccgctttggc

SEQ ID NO: 27144 - DNA, 65 bp, Mus musculus
agtctaagcaggccatcttagcggctcagcgacgaggagaagatgtggagacatccaagaaatgg

SEQ ID NO: 27145 - DNA, 65 bp, Mus musculus
ttggaagtgtgtgctgtgttgtcttgcagatgtagtgataggaaggcccagagaggagctggctt

SEQ ID NO: 27146 - DNA, 65 bp, Mus musculus
cccaccactgggactgaacacatctgacttcctctctagcaccaagggcttctgagatcctgtat

SEQ ID NO: 27147 - DNA, 65 bp, Mus musculus
gatacacggggcatacacttcagagaaactcagctactttgagcacaatctggagacatggaggc

SEQ ID NO: 27148 - DNA, 65 bp, Mus musculus
accctgggagttccacagtggtgtgctcactagccagacacccgaagagatctgtgccaataaaa

SEQ ID NO: 27149 - DNA, 65 bp, Mus musculus
aaacagaatgaagctgttacggtttcgtggggtggtccccattggtttcaggaggaagagtgggg

SEQ ID NO: 27150 - DNA, 65 bp, Mus musculus
tcgaaccgaagctgaactacagcgaccatgatgtcatcaaatgggtgcgatacattggccgcagt

SEQ ID NO: 27151 - DNA, 65 bp, Mus musculus
agtaacaccttattctgagggcacgctgcatctccgaggtcacacacctgaagggactgctctga

SEQ ID NO: 27152 - DNA, 65 bp, Mus musculus
tacagagcccacgtctagggataccaagcagtcctgtgttctcagaggaagtcgtacacattgtg

SEQ ID NO: 27153 - DNA, 65 bp, Mus musculus
gtcattgtcatctgtggctgtcctgtcacctttcttcaagtgtcctgtgcagctgccatgctgca

SEQ ID NO: 27154 - DNA, 65 bp, Mus musculus
accccactaactcaccatacgcccgcaccagctgctcccaaagcggggccaccaatgcggagagg

SEQ ID NO: 27155 - DNA, 65 bp, Mus musculus
agttagaggaggtgctgcaggtgaacagcctgatccagactcagaagagttcagagctggcagca

SEQ ID NO: 27156 - DNA, 65 bp, Mus musculus
atgaacatgatggtccagtgcgtggcattgacttccataagcagcagccactgttcgtctctgga

SEQ ID NO: 27157 - DNA, 65 bp, Mus musculus
tccacgctagcaattctgaagcaacagtgaatcaactctggtctggcactgcctattctccctgt

SEQ ID NO: 27158 - DNA, 65 bp, Mus musculus
aagtcggggtgtggatcttcatgagcagtcccagcagaacaagagccagtgttgtagcaactgag

SEQ ID NO: 27159 - DNA, 65 bp, Mus musculus
ggtcgaggaggtgcagcacgacccaatggaccagctgctggcaacaagatctgtcagtttaagct

SEQ ID NO: 27160 - DNA, 65 bp, Mus musculus
gtgtgggcagtgccaagtatgtgcctgagaagaatgttgtcatctggagcatcaagtcattccct

SEQ ID NO: 27161 - DNA, 65 bp, Mus musculus
ttacttagaccttctttgagggcagaactcagctgttgctctcatgatgggcagtgctggaaagg

SEQ ID NO: 27162 - DNA, 65 bp, Mus musculus
agccagagtcacagcctgggtatcagaaggttatgctggaagagctgcagcgatgacgacgacga

SEQ ID NO: 27163 - DNA, 65 bp, Mus musculus
gacacgcaacagcaaatcatcagggagactttccatttggtgtctaagcgcgatgagaacgtttg

SEQ ID NO: 27164 - DNA, 65 bp, Mus musculus
ttatcatctgcatcatcctggtttaggggtcctggacagcaccccatcaaccagtgagagtgtga

SEQ ID NO: 27165 - DNA, 65 bp, Mus musculus
gctctctgtgggatattgaggtcaggacgttaagcatgaggctacctaatgttgtctttgatgcc

SEQ ID NO: 27166 - DNA, 65 bp, Mus musculus
gctgtcagattgtgctcacgttgttgatagcgtcctagcaacattcacctttcggggaggttcta

SEQ ID NO: 27167 - DNA, 65 bp, Mus musculus
tgtagcttgaaggcagatgctactctggcctcagatacattgctgtggaagcaggcgcttttggt

SEQ ID NO: 27168 - DNA, 65 bp, Mus musculus
taactcagtgagaagggagccatgaaacgcagcatctcctgccgttctctcagggactctcaagg

SEQ ID NO: 27169 - DNA, 65 bp, Mus musculus
gcttttggacacagtgacgatgcaggtgacagccagaagctcagaggagctgccagtagatatca

SEQ ID NO: 27170 - DNA, 65 bp, Mus musculus
ttattagcacgacattatctgcaggtggtggggagtctggacttttggggaaccaggctgctctg

SEQ ID NO: 27171 - DNA, 65 bp, Mus musculus
ctgttctatagcctgtctttgcatctcgtactattccaggcaaacagtgtgagagcactaaaagc

SEQ ID NO: 27172 - DNA, 65 bp, Mus musculus; identical to SEQ ID NO: 23716

SEQ ID NO: 27173 - DNA, 65 bp, Mus musculus
gcacactgagcaagtgcagtgtacgacacaggaagccatgttcttcagacccggtctcaagtaat

SEQ ID NO: 27174 - DNA, 65 bp, Mus musculus
gcaacggggaagacctgaacagttatgacagtgatgaccaggaaaagcagtccaagaagaaaccc

SEQ ID NO: 27175 - DNA, 65 bp, Mus musculus
ggttggttggatggatacaaagagaagattggaaaatgaggagaataagagttagtaggaagatt

SEQ ID NO: 27176 - DNA, 65 bp, Mus musculus
cgaagacagaacctgctggatgaccttgtcacccgagagagactgctcctggcatcgtttaagaa

SEQ ID NO: 27177 - DNA, 65 bp, Mus musculus
ctggggcatcattgcctgcatcatcaaaggtgaacacagctggagcaagtgatacactgtcagtt

SEQ ID NO: 27178 - DNA, 65 bp, Mus musculus
gatgttatcttggcttctgtgggataagttcttgctgggaagggtgatgttgctatgccctccct

SEQ ID NO: 27179 - DNA, 65 bp, Mus musculus
agaggcttcgggaggagagcaggcagctcaaggaagaagacggacttcgggtgaggaaggcgatg

SEQ ID NO: 27180 - DNA, 65 bp, Mus musculus
tcgtgttattccttcagcaaatactcactgacacaaaaccctctgcagcattttccagcatatgc

SEQ ID NO: 27181 - DNA, 65 bp, Mus musculus
ctactttgtcagacactggacagttttgtcttttctaatccttgttagactactgacttaaagag

SEQ ID NO: 27182 - DNA, 65 bp, Mus musculus
aaatcataggctaaactgcagaagagatcgctgcgtggaagcacgggtgaccagacctaccggct

SEQ ID NO: 27183 - DNA, 65 bp, Mus musculus
gaagacactgacaaataccgacagcttctcgtgcgaacactgcattcctgctctgtccgatttcc

SEQ ID NO: 27184 - DNA, 65 bp, Mus musculus
ttttatcctcgtggtcggaatcgtgatcatctgtctcatcgtatggggactgaaaggctgagccc

SEQ ID NO: 27185 - DNA, 65 bp, Mus musculus
cgttgcagtctaagcttgtactctttggccgggaggtgagcccagcacatcagtatgccctggct

SEQ ID NO: 27186 - DNA, 65 bp, Mus musculus
ggcctgggtttaatactcaagagactagcagaaagtgaagaggcttctatgtagtctgtgtgcgg

SEQ ID NO: 27187 - DNA, 65 bp, Mus musculus
agctggactcaaaggtctaaaggtcattgatgttgcctgtgggagtggagatgctcaaaccctgg

SEQ ID NO: 27188 - DNA, 65 bp, Mus musculus
aacattggttttccacagtgagggagtctggggactgctggacttactgacttgccagtttggca

SEQ ID NO: 27189 - DNA, 65 bp, Mus musculus
ctgtaactgagcgaccctggggtctgctatagagctgtttctttctgtggaaagtagtggatcca

SEQ ID NO: 27190 - DNA, 65 bp, Mus musculus
atacccacggagaagctgagggagaccacgatcatcatcactgtcatggacaaagacaagctcag

SEQ ID NO: 27191 - DNA, 65 bp, Mus musculus
atctgcaacgatgtgctggagctgttggacaaatatctcattctcaatgccacccaggcagaaag

SEQ ID NO: 27192 - DNA, 65 bp, Mus musculus
gttttgagacttctccaaaggaaattgtctccttattccctcttggcagctaatgggcttttacc

SEQ ID NO: 27193 - DNA, 65 bp, Mus musculus
gatagagtcatcgtacagttagcattctggacttgaactctgatgagagatgccgaagggcagcg

SEQ ID NO: 27194 - DNA, 65 bp, Mus musculus
gcgctttccatagctgtgggactgcttgagtgtactttccccaacactggtgctcggatcatgat

SEQ ID NO: 27195 - DNA, 65 bp, Mus musculus
caaggctacggcgagggtttccgctggctttcccagtatattgactgatgtttggacagtgaaaa

SEQ ID NO: 27196 - DNA, 65 bp, Mus musculus
aggaagcttgacccatgtggaagtctctctgggacagactttctctgggtgctgagctatatgta

SEQ ID NO: 27197 - DNA, 65 bp, Mus musculus
gctttcctttgtttgatgtcatccttgtgatggcatgctcctttgctgggtaccatgtagggcca

SEQ ID NO: 27198 - DNA, 65 bp, Mus musculus
ttaccaccctcggtcctgaggtctgagcatctctcaagggtcccaggaggtccttggcccatgtt

SEQ ID NO: 27199 - DNA, 65 bp, Mus musculus
ttgcagtgtatggtttctataagaagcagcccacccaacagtgcagggccacgttaggaagttgt

SEQ ID NO: 27200 - DNA, 65 bp, Mus musculus
atggcagtggagagcggcgagaatgtcatggcctcctcttacctgcctcggcccttccctgctga

SEQ ID NO: 27201 - DNA, 65 bp, Mus musculus
tggattcaacctcccacgctaaaagcggatatcacgacgactcagatgaggacctcctggaatag

SEQ ID NO: 27202 - DNA, 65 bp, Mus musculus
gcccgacagtgcagtgaatttaccctcatggccaggcgcattgggaaagatctcagcaatacatt

SEQ ID NO: 27203 - DNA, 65 bp, Mus musculus
gaagcttgatgacctggtatccaagtcagaagtgctgggaacacagtcgaaagccttctataaaa

SEQ ID NO: 27204 - DNA, 65 bp, Mus musculus
taggtcattcttcccacgaggcttcctctgggatgaaggctttcaccagctagtggtccagcgat

SEQ ID NO: 27205 - DNA, 65 bp, Mus musculus
cctttctgagaggagaagcagcacattggcctgggacaggggcacaatctgcagctcagtggctt

SEQ ID NO: 27206 - DNA, 65 bp, Mus musculus
gcagagactcaaggagatcatctgtgagcaggctgccatcaagcaagccaccaaggacaagaaaa

SEQ ID NO: 27207 - DNA, 65 bp, Mus musculus
acccactggctcagaatgaacgctgtctacacatgttcctgcaggaggaggcaattgataggaac

SEQ ID NO: 27208 - DNA, 65 bp, Mus musculus
cgggtgactcagtatgaaagggactttgaaaggatttccacagttgtccgaaaggaagtgacacg

SEQ ID NO: 27209 - DNA, 65 bp, Mus musculus
ttgcagtggacttcgagaagcgcatcgagggttctggagaccagattgacacttacgagctgtca

SEQ ID NO: 27210 - DNA, 65 bp, Mus musculus
tgcattggagtcccctcagcaccccatgtctgcccagataagccctcaataacactcactgaatg

SEQ ID NO: 27211 - DNA, 65 bp, Mus musculus
gaggaggggttatggaaaactggaaagggcatggctctatggtctcataccttaggaagactgag

SEQ ID NO: 27212 - DNA, 65 bp, Mus musculus
aagacactggactcgattccaacaggtgtgggatcagatgaggtgccagaaaagttgctgtttcc

SEQ ID NO: 27213 - DNA, 65 bp, Mus musculus
gaaggatctgactgaagatcactccagtttgctactgcacgtgaagcagttagtgtctgacgtgc

SEQ ID NO: 27214 - DNA, 65 bp, Mus musculus
tccagggatcacagtgatgcactggattggctgtcttacagcataggcagttttgtctcctccct

SEQ ID NO: 27215 - DNA, 65 bp, Mus musculus
atgaagcaaacaagattgcagagaacaatgacctactctggatggactaccaccagaagctggtg

SEQ ID NO: 27216 - DNA, 65 bp, Mus musculus
aggccttcatccaccatgagctgctggcttacctgtattcatcagcagaccagagcagcctcatg

SEQ ID NO: 27217 - DNA, 65 bp, Mus musculus
tttacattcccaacaataagggacagctcatcaaagcctgcaaaacagaggctgacggccgggta

SEQ ID NO: 27218 - DNA, 65 bp, Mus musculus
gcgctggatcaacaactctgtgttcaatggcaatgttaccaatcaggaccagaacttcgactgtg

SEQ ID NO: 27219 - DNA, 65 bp, Mus musculus
cactctgagaataagagcctagacaaagtgatggagactcaagcacaagtggatgaactgaaagg

SEQ ID NO: 27220 - DNA, 65 bp, Mus musculus
ggtttcctgccagccatgtaaagctgctaggtccaagcagtgaaagaaccatgcctacttttcac

SEQ ID NO: 27221 - DNA, 65 bp, Mus musculus
gcctagaacctgccaggacttcaattctgggatattccctacagacattttgacaggctttgagg

SEQ ID NO: 27222 - DNA, 65 bp, Mus musculus
ccagctgtggcagtgaacattaggaatgtgtactctttagctgttaccctgctcttccagctcgt

SEQ ID NO: 27223 - DNA, 65 bp, Mus musculus
aaagaaaccaactcctggccttacacgaagcgtgaaccatgagacttctggaggaagacccatgg

SEQ ID NO: 27224 - DNA, 65 bp, Mus musculus
gcagtttacctcatttgaccttagttgcatgtgatcgaaatgtctgagtcactgcgtgcagaggc

SEQ ID NO: 27225 - DNA, 65 bp, Mus musculus
attagcaggcattacagcgacctgcagaactgcttggaatacaatgcagacaagtttgggctggg

SEQ ID NO: 27226 - DNA, 65 bp, Mus musculus
caccgcagtgttctggcttctgcgaaccttggctggccaaatggtctttccatagattacctgaa

SEQ ID NO: 27227 - DNA, 65 bp, Mus musculus
tcaagttgaagaagcaggagatggagacacaggtgcgagtcttggagctggagaagacactagag

SEQ ID NO: 27228 - DNA, 65 bp, Mus musculus
agtggaagaaagtgacaaatcccaagtttgtggaccaggcatggaaatcaactgttgctgagccc

SEQ ID NO: 27229 - DNA, 65 bp, Mus musculus
caaagggcgtcctatctgcatttccccttaacgagatgccgttatagtgtgaattgcgcctctgt

SEQ ID NO: 27230 - DNA, 65 bp, Mus musculus
caccgagaagaacattctggtgtctgacatggaaatgaacgaacagcaagaatagagccaagggc

SEQ ID NO: 27231 - DNA, 65 bp, Mus musculus
tctcagtgttgtggtcctggaacgggacagccttgccagacagcctggtgggtagaacatgcatg

SEQ ID NO: 27232 - DNA, 65 bp, Mus musculus
ctaatgtccagactcaagtactagatctatggagcccaacagaaactgtccactgttcggaggcg

SEQ ID NO: 27233 - DNA, 65 bp, Mus musculus
tccccagaaaaggctcccatgacttccaaggcaaaatcaaagcttgacaaagggagtgctggtgg

SEQ ID NO: 27234 - DNA, 65 bp, Mus musculus
tctgccctccatgcccaccaaagtcatcagtgtagatgaactggaatatagacagtgaagagggc

SEQ ID NO: 27235 - DNA, 65 bp, Mus musculus
agatctgctcaggccttcactcttctcaaggccaagggagagattccagaagtagcgtttatgaa

SEQ ID NO: 27236 - DNA, 65 bp, Mus musculus
actcatctgcagggatactgggtgatattggcagtgactgttctacattgaggctttgtttggtt

SEQ ID NO: 27237 - DNA, 65 bp, Mus musculus
gaagaacagagccgtaaagaaggcaaagcgcagaaacgttggatttgaatctgatagcggaggag

SEQ ID NO: 27238 - DNA, 65 bp, Mus musculus
atgcctatgtgtggacgctgaagggccgcacgtggaagcccacactggtcatcctccggatcaat

SEQ ID NO: 27239 - DNA, 65 bp, Mus musculus
gggactcatgtgtgaagtaggttaacagctagctcccatcccttgccagtcctgtgatttgcaaa

SEQ ID NO: 27240 - DNA, 65 bp, Mus musculus
ggcgcgaaagaaggctggattggagctatcaccggaaatgaaatcctttgtggatcaatatggac

SEQ ID NO: 27241 - DNA, 65 bp, Mus musculus
aaagaattcctgtatcagcttcatctacggcgggtgcagaggcaacaagaacagttacctctccc

SEQ ID NO: 27242 - DNA, 65 bp, Mus musculus
ctattgcttcagagcatacaactgagtgtgccctaggaagagtcagttcttgagttacgtgaaag

SEQ ID NO: 27243 - DNA, 65 bp, Mus musculus
agatctcaacaagaacaaggcaacctgtccctggatcttctgtcctcctcccatatcttggggca

SEQ ID NO: 27244 - DNA, 65 bp, Mus musculus
gcaattcctcgatgatcccaaatacagcaatgatgaggatctgccgtccaaacttgaagccttca

SEQ ID NO: 27245 - DNA, 65 bp, Mus musculus
agcctggctttcctctcaacgccatttatgccaagcctgcgagcaaacaggaggacgagatgatg

SEQ ID NO: 27246 - DNA, 65 bp, Mus musculus
actgagaagatgtttgctgaggaggaggcagagttgacccaggattcatccccagagaagctgca

SEQ ID NO: 27247 - DNA, 65 bp, Mus musculus
ttctgtcgtctccgctgcgatgcatgagttccttcgctgtatgatttaggcttctgagtcccaca

SEQ ID NO: 27248 - DNA, 65 bp, Mus musculus
gccttcgtgatttctgtatgtggccttggcacatgctatgctcagaggaaaggctacttttcaaa

SEQ ID NO: 27249 - DNA, 65 bp, Mus musculus
aggatgttggggactctgggatccttgcatcccggagtgtacttcaaacatggaggtaatgtaaa

SEQ ID NO: 27250 - DNA, 65 bp, Mus musculus
gtgctctcatctgcacctcctgccgtgacaagcgagttcgtgtcatcgagcctcgcaaaggcact

SEQ ID NO: 27251 - DNA, 65 bp, Mus musculus
aaaacttggggaccagactcttcctacctctttcctgggcatacttactctgtctcagaagacag

SEQ ID NO: 27252 - DNA, 65 bp, Mus musculus
gctgtagacaagatccaaagtacgttgcattgttgcggtgtcaccaattacggagattggaaagg

SEQ ID NO: 27253 - DNA, 65 bp, Mus musculus
tcagcaaccacaatctggctgacaccgttcagaacaagcaactgcaagctgtccttcagtgggtg

SEQ ID NO: 27254 - DNA, 65 bp, Mus musculus
gtcacctctgaggagtaatggactgtgttgtggtatcactgggcccttttcgtcttcataacgag

SEQ ID NO: 27255 - DNA, 65 bp, Mus musculus
tagcgtgtgttcctgtggatgtcgtgggtgacgtgtggcatttagagacggcagtggttcgtttt

SEQ ID NO: 27256 - DNA, 65 bp, Mus musculus
tctaaaactggcccaggggaacatctccgaaactccctgtggcacacaggggacaccagcgacca

SEQ ID NO: 27257 - DNA, 65 bp, Mus musculus
gggatgtgttttgtcccaccttagtcccattccacttttgtttcaccttatgctgtgacaagaac

SEQ ID NO: 27258 - DNA, 65 bp, Mus musculus
gaggaaatcaccccttcatgacaatgagcccttgagtggatctctagtttggttgaactacctag

SEQ ID NO: 27259 - DNA, 65 bp, Mus musculus
ggaattctccacaccctgtttcgctgtaggaatgagaagaagaggcacagggctgtgaggctcat

SEQ ID NO: 27260 - DNA, 65 bp, Mus musculus
ctgtggttcccatattacctcaccttgtttctgcactcgttgctggacctgcatgtctttgggaa

SEQ ID NO: 27261 - DNA, 65 bp, Mus musculus
ctccactgtaacgaagactctctcttgcactagtgtcaagactatgaacagatgggcctcctgcc

SEQ ID NO: 27262 - DNA, 65 bp, Mus musculus
gtctgggctcagaaccaccgcactgtgagcctggttgttgggtcctggatttttgctctcattct

SEQ ID NO: 27263 - DNA, 65 bp, Mus musculus
actcagtcctaagcagtggcaaaagcagcaacttttcttcatgtcctgccgactctgaactatag

SEQ ID NO: 27264 - DNA, 65 bp, Mus musculus
atttgaatcctgggttgcaacctctgaagagcagttaaagatgtctgttattgctgccacagctt

SEQ ID NO: 27265 - DNA, 65 bp, Mus musculus
tccctttccaattcgggagacctctagacactttgctgatttagctcacaacagtgataggaatt

SEQ ID NO: 27266 - DNA, 65 bp, Mus musculus
cactcttcctgaaaactggaatcatccagcagagctgtgagagccttcagcaactggacattgct

SEQ ID NO: 27267 - DNA, 65 bp, Mus musculus
ggactcagctcagaccagtgatacaggcaccaatttggggaccaactctacttccctttctgaaa

SEQ ID NO: 27268 - DNA, 65 bp, Mus musculus; identical to SEQ ID NO: 23716

SEQ ID NO: 27269 - DNA, 65 bp, Mus musculus
aactccatggggactttgagaacctcgatctccgtggaacggcagatccacaagctgcaggactg

SEQ ID NO: 27270 - DNA, 65 bp, Mus musculus
ctggttctgatagtcacttatggcaacccaggtacattcaactaggatgaaataaattctgcctt

SEQ ID NO: 27271 - DNA, 65 bp, Mus musculus
caccaagaagggccataagatctgtactgaccccaagctgctgtgggttcagaggcacatacaaa

SEQ ID NO: 27272 - DNA, 65 bp, Mus musculus
gggaccacatgtccattgctttagcatctgccaatagttgcttcaaccctttcctgtatgccctc

SEQ ID NO: 27273 - DNA, 65 bp, Mus musculus
ggcagaagataccatgtccaaacctagctgcaagcacaaactaggaaaggatctagcctgttccc

SEQ ID NO: 27274 - DNA, 65 bp, Mus musculus
tagtcattgtgtctttactcttctgggtcccattcaacgtggcccttttcctcacgtccctgcac

SEQ ID NO: 27275 - DNA, 65 bp, Mus musculus
tatgagataccttcgcagcctgttcccacggtgcaatgatatcccctatcaaagtagtggaggct

SEQ ID NO: 27276 - DNA, 65 bp, Mus musculus
ttccaacgagatccggacgtgtgacagctatggctgtggacagtactctgctcaaagaacccaaa

SEQ ID NO: 27277 - DNA, 65 bp, Mus musculus
gttcttcgagagccacatcgccagagccaacgtcaagcatctgaaaatcctcaacactccaaact

SEQ ID NO: 27278 - DNA, 65 bp, Mus musculus
tcagctctgtgcacctccagaccagccctgggtggatcgcatcatccgaagactgaagaagtctt

SEQ ID NO: 27279 - DNA, 65 bp, Mus musculus
acgttccttctgcgttccgtcaaagtcgtccctgatctgaacatctctgcctgcatcctgctttt

SEQ ID NO: 27280 - DNA, 65 bp, Mus musculus
atacgaaacgctctctctgaggattcagtgggcagggatagcaagactttcactccgtccacaga

SEQ ID NO: 27281 - DNA, 65 bp, Mus musculus
cgtgagatctgcctctacccatgcagaacagttagcagtaaaggaagaggtggaggagtagaaaa

SEQ ID NO: 27282 - DNA, 65 bp, Mus musculus
tcctgtacaagaccagacccaccaacgtctcagcatgtatgaggaaggaactactgcgctaaagg

SEQ ID NO: 27283 - DNA, 65 bp, Mus musculus
cgtcctttaccatgtaacacgagagcacaaagcaacattgccccaaaagccttggtgaaacttgc

SEQ ID NO: 27284 - DNA, 65 bp, Mus musculus
agcaggcaggacagcattctgagcagtttcactcactacacaagcgagggagatgggtctctcct

SEQ ID NO: 27285 - DNA, 65 bp, Mus musculus
gtgtctaggcaggacctgtggccaagttcttagtagctgtttatctgtgtgtaggactgtagaac

SEQ ID NO: 27286 - DNA, 65 bp, Mus musculus
gataaaagtgggtgtggcatctcacaaagacagccacaaggagtagcagagcttctggcctaggg

SEQ ID NO: 27287 - DNA, 65 bp, Mus musculus
cccctgggttagtgtcttgtggatctggttcattttctggtggcctcatgggatggttctcatat

SEQ ID NO: 27288 - DNA, 65 bp, Mus musculus
cctttcttcctgctctgctcctactgagacccacagtctctcttgggacaactagggctacaatt

SEQ ID NO: 27289 - DNA, 65 bp, Mus musculus
cccagatggagttcacttaccatacctgcagagcaattttgcccaggaagagcctgatacgtttt

SEQ ID NO: 27290 - DNA, 65 bp, Mus musculus
cagccgctctagggagggtaccatggaactccgaactactcctaagctgaaagtaatggggcagg

SEQ ID NO: 27291 - DNA, 65 bp, Mus musculus
cagctttggagagttttcctgcagtcctcgctatccagaaggtgaagaagacagctggaaacgtt

SEQ ID NO: 27292 - DNA, 65 bp, Mus musculus
aacttcaagctgggtggttcacggtccaactcacaggcaaagagggagctagaaaacagactcag

SEQ ID NO: 27293 - DNA, 65 bp, Mus musculus
gccttcttcaacagcgtggtcaacccactgctctatgtgttcacatgccccgacatgttgtacaa

SEQ ID NO: 27294 - DNA, 65 bp, Mus musculus
gcctccaggacaatgtttcctcactcgttaagcagctcatctcagttcccaaacccattgcacaa

SEQ ID NO: 27295 - DNA, 65 bp, Mus musculus
acacgctctttccgattgtttacagtgtcatcatccacacgctgctcatcatcatccacacgctg

SEQ ID NO: 27296 - DNA, 65 bp, Mus musculus
tgctgcttgaatgagaccaggttctgactcatccaggggtctgtctgacctttgtatgggtggat

SEQ ID NO: 27297 - DNA, 65 bp, Mus musculus
catcctgggcatccaaggagagatccagaagatttgccaaacatacggactacggccaaagtccg

SEQ ID NO: 27298 - DNA, 65 bp, Mus musculus
ggtttaaggagtcacatgtaacatcccagcctcctctattggtttcagaaacttcaaggggcacc

SEQ ID NO: 27299 - DNA, 65 bp, Mus musculus
aagcagaactcagacctgggacagcgagtctggcttgtgttgggcagccttcctactgctcacct

SEQ ID NO: 27300 - DNA, 65 bp, Mus musculus
gaaacagctctcatgttctagatttctctggagtgctacacagggatatggctcttcaaatgggg

SEQ ID NO: 27301 - DNA, 65 bp, Mus musculus
taacatctgtgtgcccagacatctccatgacaagctcagctttagggtcagtcttctgatgcatc

SEQ ID NO: 27302 - DNA, 65 bp, Mus musculus
ggcttaacctgtttctctggcttttatgcttctgtggcatgtggaccatgaaccatgtccaaaga

SEQ ID NO: 27303 - DNA, 65 bp, Mus musculus
agaagatgctcgcttccgcatgttctgcaagcagggagtattgaccctggagatcaggaaaccct

SEQ ID NO: 27304 - DNA, 65 bp, Mus musculus
tcagccagacacactaaacttagcttccactcccagctccgtagccactgccaccatctagctag

SEQ ID NO: 27305 - DNA, 65 bp, Mus musculus
ctggtccgagctggagtttccctgatgtcccagagtcaagagcagggatctgatccgatgaaatt

SEQ ID NO: 27306 - DNA, 65 bp, Mus musculus
gtgccactgatgttttcaagtgcaggactcactcaaacctctcagcatcttaggactgtttcaag

SEQ ID NO: 27307 - DNA, 65 bp, Mus musculus
gaagggtcgagttggaggccgctggaagtgagactgccaggacatgacctgctgtgtggagccca

SEQ ID NO: 27308 - DNA, 65 bp, Mus musculus
tttgcctctgcaggtgcattatgggggatacttgccttgtttgtggcagctccttcatcttcatc

SEQ ID NO: 27309 - DNA, 65 bp, Mus musculus
attgaagccaaatgcctccacaacaccagagagatcaaggacctgaagctgaaggtgctggacct

SEQ ID NO: 27310 - DNA, 65 bp, Mus musculus
gaacattgaccatcttagcgatgacaagctgagggacaaggccaaggaactctgggataccttgt

SEQ ID NO: 27311 - DNA, 65 bp, Mus musculus
agactgcagttcagtgagggacctaggtgtgaggacagaaggccggcatggatttctggtgtcct

SEQ ID NO: 27312 - DNA, 65 bp, Mus musculus
acattccctcctggtcctggactgtgtgggagtcagccagtgcatatggacgaggctaaatcagt

SEQ ID NO: 27313 - DNA, 65 bp, Mus musculus
tccaatctcccgccaaacccagagcatctgtgaactcagacccaagcctttggatgtcaattaga

SEQ ID NO: 27314 - DNA, 65 bp, Mus musculus
agcatgaacgacacactcttttcccactctgttccctcctcaggaagtcctttcatcaccaggag

SEQ ID NO: 27315 - DNA, 65 bp, Mus musculus
gatgtttctcttccaaaagtagagggagaattgaagggtcctgaagttgatgtggatgttggtga

SEQ ID NO: 27316 - DNA, 65 bp, Mus musculus
tgcatgggaagtgtgaacactccatcaatatgcaggagccatcttgcagatgcgatgctggttac

SEQ ID NO: 27317 - DNA, 65 bp, Mus musculus
tcagatccacaacggcatcctgcgcttgccagccattgaaccctcggatcagggccagtacctgt

SEQ ID NO: 27318 - DNA, 65 bp, Mus musculus
tctgtctcgcaccttcaccactaacgactctgacaccaccattcccatggatgaatcactgcagt

SEQ ID NO: 27319 - DNA, 65 bp, Mus musculus
taaggcaacatggggagatggtggcgacaactcacctagcaatgtagtatctaagcaaccgagcc

SEQ ID NO: 27320 - DNA, 65 bp, Mus musculus
ctctgatcacatacggggcgatagagagatcgataaagaggaccagtgctcagaacctgtagctt

SEQ ID NO: 27321 - DNA, 65 bp, Mus musculus
aaggagaagattcctgaccctcatgccctaagactgtggctcaaggtcaacggagagctcaggca

SEQ ID NO: 27322 - DNA, 65 bp, Mus musculus
gcggcctggtgatgtgatcttggccattggggagaaattggcacaaaatgctgaagatgtttatg

SEQ ID NO: 27323 - DNA, 65 bp, Mus musculus
ccacaggagagagcaaactagcagtgccaacatcagcaaagagttcacctaccaactgagcccga

SEQ ID NO: 27324 - DNA, 65 bp, Mus musculus
tacagcaatcgctctgcagcctacgccaagaaaggagactaccagaaggcctatgaggacggctg

SEQ ID NO: 27325 - DNA, 65 bp, Mus musculus
cagcaacatctatgaggtctttctgacgcagactgtagacacgcttaagaagaaggtgtcccagc

SEQ ID NO: 27326 - DNA, 65 bp, Mus musculus
tcccattcggcggaaaagatccaggtcttcagaaagaggcagatcgcccaaacgtctaacagatt

SEQ ID NO: 27327 - DNA, 65 bp, Mus musculus
tttgtgcaaagctttgtggagtggattctgaagagcccctttagactagagtgttgaggcttgtg

SEQ ID NO: 27328 - DNA, 65 bp, Mus musculus
tcgggtggtttccgttcagacagaggccagttcagaacttcccggatgatggtggtcctcgagat

SEQ ID NO: 27329 - DNA, 65 bp, Mus musculus
ggcggcgttttccgatcctgctgcggtctaggtggcgtttctgtccggccacgagagactgtata

SEQ ID NO: 27330 - DNA, 65 bp, Mus musculus
agtcatcctgaaggtgaaggactgtccccctgctgacctcatcataaagcagaagctgatgccca

SEQ ID NO: 27331 - DNA, 65 bp, Mus musculus
ggtctgacgaaggcagcagccctcaggatcctgtatgacactacatcatgagtgacagtaaaagc

SEQ ID NO: 27332 - DNA, 65 bp, Mus musculus
acagcaaagcaggttgaacggatgcagatgatcaatggcagtgacctacccaaagtgtccaccca

SEQ ID NO: 27333 - DNA, 65 bp, Mus musculus
cgtccaggatggacctgactttcaagacagagttgtcaacagtgagacaccagttgttgtggact

SEQ ID NO: 27334 - DNA, 65 bp, Mus musculus
actgaaatgattgggcaattggtattatgtcccccagaccaaagagaagccaagactgccttggc

SEQ ID NO: 27335 - DNA, 65 bp, Mus musculus
ttcaataatagctgaacctttgttaaaaaatgttaataaaggttttgttgcatggtaagcgtacc

SEQ ID NO: 27336 - DNA, 65 bp, Mus musculus
cccctgaatacaggcatctcttggataatgatgggaaggacaaaccagagaagccaccgactaag

SEQ ID NO: 27337 - DNA, 65 bp, Mus musculus
attcagacaacagaggcggagaagcaggagctggaacagcagcgtgtcatgaaggagcaggcatt

SEQ ID NO: 27338 - DNA, 65 bp, Mus musculus
acaaagaagagactggtacggaaccagcagactcggagcctctggaattaggaggtcctggagct

SEQ ID NO: 27339 - DNA, 65 bp, Mus musculus
ggattactaccagaaagagagatacatgacctagagcagaccaacatggaagacgaggacattga

SEQ ID NO: 27340 - DNA, 65 bp, Mus musculus
ccggaggtccatgccagcatgcagcttcgaattgctaggattccttgagtggtctgaccagcaat

SEQ ID NO: 27341 - DNA, 65 bp, Mus musculus
ccagtgacacttgtcaggagtcagagccttgtctgttagactggacagcttgtggcaagtaagtt

SEQ ID NO: 27342 - DNA, 65 bp, Mus musculus
taactcggaggagcagtggacaaaagcgctcaagttcatgctgaccaatctcaagtggggtcttg

SEQ ID NO: 27343 - DNA, 65 bp, Mus musculus
agcggaggttcagctcatggattggtggctctatcctagcatctttgggtacctttcaacagatg

SEQ ID NO: 27344 - DNA, 65 bp, Mus musculus
aacctctacatttgagtctgcagccttccctggttggttcatcgctgtctgctctaaagggagct

SEQ ID NO: 27345 - DNA, 65 bp, Mus musculus
gtgcactcggaattcatgcacgatcacgtggattacggctttcaaagctgtgagggtaaattcag

SEQ ID NO: 27346 - DNA, 65 bp, Mus musculus
gacaaatgcaaacctaagaaatgtcgacaggagtgcaaaaagagttgccctgtggttcggatggg

SEQ ID NO: 27347 - DNA, 65 bp, Mus musculus
tctgcactacgagtcctgcctgacacgatgaggaacctcctctctacccagaaggatgccatctt

SEQ ID NO: 27348 - DNA, 65 bp, Mus musculus
ttctgtcgtgccagtccttcagaaagtgaactctactactaccaagccagtgctgcgaactccct

SEQ ID NO: 27349 - DNA, 65 bp, Mus musculus
gaggggacagatgttgattggacctgatggccgactgacacggtgccaagctcaggcctcagaag

SEQ ID NO: 27350 - DNA, 65 bp, Mus musculus
actttccacccaagttaaagaacatagacttctttggaatagagacacagcagcaagagcattgg

SEQ ID NO: 27351 - DNA, 65 bp, Mus musculus
agggatctgagcatggtccaggattgaggctaagtagcgaccagctgactctctactgcacactg

SEQ ID NO: 27352 - DNA, 65 bp, Mus musculus
gatttgccctgtaacgtctgattcctcctttatctgggttgtagatggggcatagtgacttctag

SEQ ID NO: 27353 - DNA, 65 bp, Mus musculus
gctgcactctactgaagcgtgtgtttactgctcagatgctctacctggtctgtgttggtgtaact

SEQ ID NO: 27354 - DNA, 65 bp, Mus musculus
agttcactcaccgtacctgtagccctcatttcccctacaagagcctgaagcagtggaagaggttt

SEQ ID NO: 27355 - DNA, 65 bp, Mus musculus
ggtgtatgacttggtcacccatcaggacattgcacatgccttggcctatgaggggcaagtagaat

SEQ ID NO: 27356 - DNA, 65 bp, Mus musculus
ttctgcggcaagcacgtgagttcacattctgaaactctagaaagatttccaggagtggggtgtgc

SEQ ID NO: 27357 - DNA, 65 bp, Mus musculus
gaattttggtgtcccagatggtagcacgggtttttccagtagattggcagctacacaagacatgc

SEQ ID NO: 27358 - DNA, 65 bp, Mus musculus
aacctcaaagacttggttccaggctctccagagaccatacccaactcatgtgcatgtgccgtttt

SEQ ID NO: 27359 - DNA, 65 bp, Mus musculus
agatccacctgtccctctgcctcggagtgacaaacggcactggacaccatgcctagaggtctttt

SEQ ID NO: 27360 - DNA, 65 bp, Mus musculus
gttcacacgagcttttctatcacctgacctgacgaagtcatagctggggaggttcggttactatg

SEQ ID NO: 27361 - DNA, 65 bp, Mus musculus
aagaaatgtggaagcagaggctcctgcaggctgtatgactcccacgctttcagacacatatacct

SEQ ID NO: 27362 - DNA, 65 bp, Mus musculus
gtagttgggctagctcgaacttacccgtaactttgctgccaggatgcactgacagctcagcatat

SEQ ID NO: 27363 - DNA, 65 bp, Mus musculus
gtcagaacccacccttttctcaccctctgtatcatcagattcagttctcttcaataggtgaacac

SEQ ID NO: 27364 - DNA, 65 bp, Mus musculus; identical to SEQ ID NO: 23716

SEQ ID NO: 27365 - DNA, 65 bp, Mus musculus
gtgcagctttctgagaagatgaaggaaaccaacatgaaggacagaagtctgcctaaggctttggg

SEQ ID NO: 27366 - DNA, 65 bp, Mus musculus
attcaggccatcatgaatacctcatgtgttatcagaagcttctcagaattttgggaatatacttt

SEQ ID NO: 27367 - DNA, 65 bp, Mus musculus
tctccacacttagcaagcaagcaagagatgacagtctctctaaatgctcccacagagcacccctg

SEQ ID NO: 27368 - DNA, 65 bp, Mus musculus
gcctggtagaactgaatcaatgtgtaagaatgctggagagaaggacagatactaggaaaagttgc

SEQ ID NO: 27369 - DNA, 65 bp, Mus musculus
agaccctcagtgtcttttagtctgattaggttacaccttgtgaaatgacaagtagttgctgtcag

SEQ ID NO: 27370 - DNA, 65 bp, Mus musculus
tgagactgatacatacgcctgcagagttaagcatgccagtatggccgagcccaagaccgtctact

SEQ ID NO: 27371 - DNA, 65 bp, Mus musculus
aagacatagatcctgggaaagccacaaaagcagcagtcagtgtgaagcccctgtgacagcacagg

SEQ ID NO: 27372 - DNA, 65 bp, Mus musculus
aggtgggaggggagacttggcaaggagagatgtcgtggcaaaactaggaaaagagacattcttgg

SEQ ID NO: 27373 - DNA, 65 bp, Mus musculus
gaagaaccgacaaggacacggagatcacgtgctccgagcgcgtgaggacctactggatcatcatt

SEQ ID NO: 27374 - DNA, 65 bp, Mus musculus
ggggaccattcctggagctggctaggattcccctaagcgcttcctgggagaaaactggaacaact

SEQ ID NO: 27375 - DNA, 65 bp, Mus musculus
gggtactcacagaggtgatttcctgccaaatgctgatgagacatggtatcttcaagcaaccctgg

SEQ ID NO: 27376 - DNA, 65 bp, Mus musculus
attatgcactggacagccacacaccgtgtacccatagggccccaaatgtggggtcacatggtctt

SEQ ID NO: 27377 - DNA, 65 bp, Mus musculus
ggaagccatggttgccagccctgaatgcctgtcatactatggtcttgacaatataagatccattt

SEQ ID NO: 27378 - DNA, 65 bp, Mus musculus
ctctagtatggcttttgactgaagactggctcagcaagaggaaagatcatgaagaggccaacaga

SEQ ID NO: 27379 - DNA, 65 bp, Mus musculus
catagaacttcctttccagaataagcatctgagtatgctcattgtgctccccaaggacgtggagg

SEQ ID NO: 27380 - DNA, 65 bp, Mus musculus
actctgatggcaaaaggctcttctattctgaactactcctatcccctttgtgaggaggaccagcc

SEQ ID NO: 27381 - DNA, 65 bp, Mus musculus
ccctgaaaaaccccattacctctgtacaaaaaagtggctccacatagaaaaacctgctccccaaa

SEQ ID NO: 27382 - DNA, 65 bp, Mus musculus
aaagtctttaaatggattcttctgaaaatgtcttcattttgggtaattgtgtgtagtaactgaga

SEQ ID NO: 27383 - DNA, 65 bp, Mus musculus
tgtctgtcaggttgggtctgtcttgcactgcccatgctctatgctgcacgtagaccgttttgtaa

SEQ ID NO: 27384 - DNA, 65 bp, Mus musculus
ctgaaccctgcataagactgaggggaaccaatggatttgtgcatgttgagttcattccaagagga

SEQ ID NO: 27385 - DNA, 65 bp, Mus musculus
gctgcgtatcaaagccagcaccaggacaggctcttatggacatgtgtacagtagaatcttctgtg

SEQ ID NO: 27386 - DNA, 65 bp, Mus musculus
tgacccattagtagtcttgaatgtggggctctgagataaaggcccgcagacagggacaagggatg

SEQ ID NO: 27387 - DNA, 65 bp, Mus musculus
tgtgtgacttgctggacacctcccagactcagatgagacactacatagttgggtccttagcagtg

SEQ ID NO: 27388 - DNA, 65 bp, Mus musculus
tcgggtcccaacctgaagggggaggaagagccgcttgtgggcagtgaggatgaagctgtggaaac

SEQ ID NO: 27389 - DNA, 65 bp, Mus musculus
gagctgctaggtgacaaagggaagaaccctcaggatagggctgtggtgggagtgagattaggaaa

SEQ ID NO: 27390 - DNA, 65 bp, Mus musculus
gatgacctccccactcgaagacaatgtcctctgtgctgtatttgccaatgaaagtggacaacagc

SEQ ID NO: 27391 - DNA, 65 bp, Mus musculus
cctctcttccgatcgatacagcattgggtgacaagttctgtgatctgctttccatcctgtctcac

SEQ ID NO: 27392 - DNA, 65 bp, Mus musculus
ctgatgccctaacggccatgctaatgagtcagttatcagagcagagagacttaaagccaaaatgg

SEQ ID NO: 27393 - DNA, 65 bp, Mus musculus
gccttcttccagaaacttgtgacagctggtattgtggagaatgagtggaaaagaatgtgtaccag

SEQ ID NO: 27394 - DNA, 65 bp, Mus musculus
gggacttctcctgggcatagcattggtgatgcgagtggatgtcgctgtgagttcctggttcaaaa

SEQ ID NO: 27395 - DNA, 65 bp, Mus musculus
ttccaagctctccaaagtttccaaaagacaatcaatggtataagatgtgccctccaggaactacc

SEQ ID NO: 27396 - DNA, 65 bp, Mus musculus
accagcatccagttcacctgtgacactgatatagctcagttccgacagctctgtccggatgacat

SEQ ID NO: 27397 - DNA, 65 bp, Mus musculus
aatagaatccagtccgttatgttgatggctacatctttgctctcaaggaagcctcttgcctgatt

SEQ ID NO: 27398 - DNA, 65 bp, Mus musculus
tttagtggccctcttcttggccagttgccgagccaccacatcctcagatcagaagtgcattgaga

SEQ ID NO: 27399 - DNA, 65 bp, Mus musculus
agctgtcttatgcaacctcgtcatggggctagcactgacgtccctttgtacttgggcatatgtta

SEQ ID NO: 27400 - DNA, 65 bp, Mus musculus
gattagattggtgtccatggctgtttgctgttggattacaggcaggttccaccagacaggatggg

SEQ ID NO: 27401 - DNA, 65 bp, Mus musculus
agtaaagtcagaccccactcctgaaccacaagtgaggaggtctgctggcagtctgtgtgcggatt

SEQ ID NO: 27402 - DNA, 65 bp, Mus musculus
gctgcccaaccaagtctaaagggaatggcttactcaatggcctttgttctgggaaatgataagat

SEQ ID NO: 27403 - DNA, 65 bp, Mus musculus
aactggtacatcagcacctcacaagcagagcacaagcctgtcttcctgggaaacaacagtggtca

SEQ ID NO: 27404 - DNA, 65 bp, Mus musculus
agaaaggtagcaaggaaaagcaggctgacttcctggacaagcagatgagccgagatgagcacaga

SEQ ID NO: 27405 - DNA, 65 bp, Mus musculus
atgaaaatggatggaagtggagcagctctgaccctctgaccttctataactgggagataccaccc

SEQ ID NO: 27406 - DNA, 65 bp, Mus musculus
cctgcaaagatgcggggagttctgtctcaagccatggtgatgtgtgccagttcaccagagaaagt

SEQ ID NO: 27407 - DNA, 65 bp, Mus musculus
tcctggagcttggcctgctgtttcttgcccgttgtgctttcgctgggatctcttgctgcataata

SEQ ID NO: 27408 - DNA, 65 bp, Mus musculus
catcccatggatgaggtagactggtgctgccatgcccacgactgttgctatgagaagctctttga

SEQ ID NO: 27409 - DNA, 65 bp, Mus musculus
ttgcacacacaaaggaaggtctccccggcctccatgcaggtaccgagcctctaaagggttcagat

SEQ ID NO: 27410 - DNA, 65 bp, Mus musculus
tgcaaaggacttgagagcatttgtgctttgtgtagctggtctgagaagtgggtgcttaattgtgg

SEQ ID NO: 27411 - DNA, 65 bp, Mus musculus
ggactcgtcagcgctcacaagatccactaagtcgcctctggcatctcaataccctcttctgaata

SEQ ID NO: 27412 - DNA, 65 bp, Mus musculus
taagtagaaactgtcataatagttcatctcgggtacgtataactgtctgtaacatcaccagtcgg

SEQ ID NO: 27413 - DNA, 65 bp, Mus musculus
gacagttacaagttcacaagaaggaaccaaggatcagcctgagagaacccagagttaaggctctt

SEQ ID NO: 27414 - DNA, 65 bp, Mus musculus
tccccatcctttggcattcaattctgtccccagtccctcctggtcataaagtcaggctttccaca

SEQ ID NO: 27415 - DNA, 65 bp, Mus musculus
acaggcgagtctcagtgctttgcaggatcatttcttctcagtgtccaagccagcaaagaagcaac

SEQ ID NO: 27416 - DNA, 65 bp, Mus musculus
ctttacaatgggggttaggggatcaggtcaagttggaatctgctgtttagaagtaggtcagctca

SEQ ID NO: 27417 - DNA, 65 bp, Mus musculus
tgtagggaatggttgtttccttcacatgaaagtcttcagaggcctttctggagaagatgatttga

SEQ ID NO: 27418 - DNA, 65 bp, Mus musculus
tctcaaagtcttcccgcctcacaaacccgtctgcaggtcacagcttctcctcagtccctctgtgg

SEQ ID NO: 27419 - DNA, 65 bp, Mus musculus
tttccacacttctatgcctcctgctcatagctaccaccatcagtcctcaggtattggctggacca

SEQ ID NO: 27420 - DNA, 65 bp, Mus musculus
ttgacactgaccctggctgtgatccctgaagccagtactaatgctgaagccaagcaggtggtatt

SEQ ID NO: 27421 - DNA, 65 bp, Mus musculus
caaggtacaccttcgatttccccatttgtttgcagaacacaatgatgagtccttagaagacaagc

SEQ ID NO: 27422 - DNA, 65 bp, Mus musculus
atgacctgcccttgcctggaggagtcatgccccgcatgctgatcacaatcatgggcacagtgaaa

SEQ ID NO: 27423 - DNA, 65 bp, Mus musculus
aagacgtgctctgagggaatatcagcaccagtcgcccaaggacttggcttcatgtagttccagat

SEQ ID NO: 27424 - DNA, 65 bp, Mus musculus
cctcttcatcaaggttgatgttggtggagataaatgcgtgcacttgagggtgtttcaacccctcc

SEQ ID NO: 27425 - DNA, 65 bp, Mus musculus
gaaatcctctcccaaatgtgatgatgcaatgcgggtcgttaacaagtatacaggaaaatgtaagg

SEQ ID NO: 27426 - DNA, 65 bp, Mus musculus
atgacacaactcataactctggcctgacccacttctgtacctggaggagaacatgttggggactg

SEQ ID NO: 27427 - DNA, 65 bp, Mus musculus
ctccaagtatcccaactgtgactacaagaccactcaataccagaagcacatcattgtggcctgtg

SEQ ID NO: 27428 - DNA, 65 bp, Mus musculus
acctcaagcacttctgtaggagtgaccagtgtgacagtgaactagtgtgactcggactgtgatgc

SEQ ID NO: 27429 - DNA, 65 bp, Mus musculus
tttaatcctgcctgctccaggctaacaggccagtaccctcaccttcgagtttctggcaacactac

SEQ ID NO: 27430 - DNA, 65 bp, Mus musculus
tttaagggctggtctgagtcctcgctcaagtggctgggatggctgtcctagctctgtactgtaag

SEQ ID NO: 27431 - DNA, 65 bp, Mus musculus
atcacttataactgtggtttggtgctgtaatctcccctaaggctcacatctttgaacagttggtc

SEQ ID NO: 27432 - DNA, 65 bp, Mus musculus
agtttcagtgttaacttcggaatccagtccgctgtcaggggaatcaaccagggtcaagtctggat

SEQ ID NO: 27433 - DNA, 65 bp, Mus musculus
atcaggatacatctaccctagctactacccttaccaggagaacttgggtgtgagaacaggcgtgg

SEQ ID NO: 27434 - DNA, 65 bp, Mus musculus
tctgcgttgtagaaactagtaagaacactactgtttgtttcctagctagtcacactggcttcccc

SEQ ID NO: 27435 - DNA, 65 bp, Mus musculus
gtaacctcactatgccgacaagaatatgcacacaatgcagataccaaacgacaggttcagtgaag

SEQ ID NO: 27436 - DNA, 65 bp, Mus musculus
atctgtttgcgtggccaggcaacgccgacctcacccatatcggggacgagattccaaaggaaatt

SEQ ID NO: 27437 - DNA, 65 bp, Mus musculus
ggcacgatccactacaaatccctcaaagacctcaaacagtttgccccaagccccaattgcaacaa

SEQ ID NO: 27438 - DNA, 65 bp, Mus musculus
ccaaggaagaggcatgggcacagaagacttgaatgccacagactgagttcactctcaatgtcaga

SEQ ID NO: 27439 - DNA, 65 bp, Mus musculus
ctaggacacagttgtccaggtgctgttggccagtcccaacatggaccataaggaagtaatccttc

SEQ ID NO: 27440 - DNA, 65 bp, Mus musculus
gagctcctaagagagttgtgaagaaactcatgggtcttgggaagagaaaccagggagatcctttg

SEQ ID NO: 27441 - DNA, 65 bp, Mus musculus
cataatccaggaaacatatggctgccaagtcaagcagagaacgtacttcagtcacgccttcatgg

SEQ ID NO: 27442 - DNA, 65 bp, Mus musculus
cctaaacaggctctcctctcacttatcaactgttgacacttgtgcgatctctgatggctgtcctg

SEQ ID NO: 27443 - DNA, 65 bp, Mus musculus
cgactttgagaagggaatgactgcttacctggacttgcttttgggaaactgttatctgatgcccc

SEQ ID NO: 27444 - DNA, 65 bp, Mus musculus
tcagactccgtgcttctgatgcctgccagccatgtttgactcctgtccaatcacagccagccttc

SEQ ID NO: 27445 - DNA, 65 bp, Mus musculus
ttactatgagaccagcagtctttgctccaagccagctgtggtattcctgaccaaaagaggcagac

SEQ ID NO: 27446 - DNA, 65 bp, Mus musculus
tttgcagagcctagaagatggaattatgcagcttttccttgttctgcggtgttgctatgagcccc

SEQ ID NO: 27447 - DNA, 65 bp, Mus musculus
cctaagcagggcctggagtggattggaaggattgatcctgcgaatggaaatactcattttgaccc

SEQ ID NO: 27448 - DNA, 65 bp, Mus musculus
aatttgagacatgcaattgcactgtactatagtttaacagcgaaggggctgaagcacagcggcag

SEQ ID NO: 27449 - DNA, 65 bp, Mus musculus
atacatccacatttcttcaggtctactcgtctcatttcacctgtgggcgtccttccttccctgcc

SEQ ID NO: 27450 - DNA, 65 bp, Mus musculus
tgtctatttctgtgtccttgatccccgactcaagcaacccagctctgctttgcctgctctctgga

SEQ ID NO: 27451 - DNA, 65 bp, Mus musculus
cagcggtggtaaaggctttgggagaactaggcattcttctgagatggatggaggagatgctatag

SEQ ID NO: 27452 - DNA, 65 bp, Mus musculus
agttgttcgccctgccacaatagagcaatgagtgcccccaataaagtccactccatgtagccaca

SEQ ID NO: 27453 - DNA, 65 bp, Mus musculus
gccttgcacctgtccaagttagccaaagactctgcggctttcttcagcaccaagtttgatgagga

SEQ ID NO: 27454 - DNA, 65 bp, Mus musculus
cctgtcgctccactgaaaccccttctagcatctttgctttagcctgtccagcttttcaagtcgtt

SEQ ID NO: 27455 - DNA, 65 bp, Mus musculus
cgatttactgctaggtcctgagtcagccattgcactcaacaagacaccagtctctttgaggtgac

SEQ ID NO: 27456 - DNA, 65 bp, Mus musculus
cttgaagatatgcgccaaccactatattacaccaatgatggagctgaagccgaatgctggcagtg

SEQ ID NO: 27457 - DNA, 65 bp, Mus musculus
cagctcaggaataagccacagtaactcgggtcgatggctgaagtttcctggtacaagtggaataa

SEQ ID NO: 27458 - DNA, 65 bp, Mus musculus
gcccttggatgaaggccagcaggaagtgttttgggtaaatctgagaactgcaataaagtcctagg

SEQ ID NO: 27459 - DNA, 65 bp, Mus musculus
acatgtggaagtagctatgttcctgactgtttcctctgccagacaatgaactctggagatcaggg

SEQ ID NO: 27460 - DNA, 65 bp, Mus musculus; identical to SEQ ID NO: 23716

SEQ ID NO: 27461 - DNA, 65 bp, Mus musculus
ctctttcgttaaaagccaaagtagaggctgtctggccttagaagaattcctctaaagtatttcaa

SEQ ID NO: 27462 - DNA, 65 bp, Mus musculus
gctgaacatctggaccaatatgctggagccatatcgccagaacagagcccatgatgtcttcagca

SEQ ID NO: 27463 - DNA, 65 bp, Mus musculus
ggagtcactcgaagttatacaaagcacagatgacaccaaagttctctgcaggaatgaagagggca

SEQ ID NO: 27464 - DNA, 65 bp, Mus musculus
gcgctggtcacccccaagcccctggccacccattatcaccttgtttcgcccatcagagttgtaag

SEQ ID NO: 27465 - DNA, 65 bp, Mus musculus
ttgcaaagtctcgagccctcatatacacacacctgtgcaagaagcagagtgaaggaaggactggc

SEQ ID NO: 27466 - DNA, 65 bp, Mus musculus
aaccttcttgctcctctggagggagcatggcctggcttagccgagtgactggactgtgtgagatt

SEQ ID NO: 27467 - DNA, 65 bp, Mus musculus
tatacccccagtgaccccttaggcaaggacttgttgagaactgcatcacattttgacctgttctc

SEQ ID NO: 27468 - DNA, 65 bp, Mus musculus
atcacgcagatcgccaagggccatgagcagtggttccgagtgagcctgaggaaactgctaggcta

SEQ ID NO: 27469 - DNA, 65 bp, Mus musculus
gagaatgcaagtgcgaagccgtgcgcgccgtggatgaagcagaagaagcccgagtattgggagga

SEQ ID NO: 27470 - DNA, 65 bp, Mus musculus
gctagccaaattccctggttaagctggctctgtccttccctgtgtttcctggattgtgattcagg

SEQ ID NO: 27471 - DNA, 65 bp, Mus musculus
tcttattccgagcattccagtaacttttgtgtatgtacctagctgtactataagtagttggtttg

SEQ ID NO: 27472 - DNA, 65 bp, Mus musculus
gtgccaattcgatgatgagtcagcaactgtggtggactttctgaggagatggatagccttctgtc

SEQ ID NO: 27473 - DNA, 65 bp, Mus musculus
gtcacgttaggacgaactgaaacggtacaaactggttaacactacagcgccttttgcacaaatgc

SEQ ID NO: 27474 - DNA, 65 bp, Mus musculus
tgtccagcgcaggcacttgcccctcatcctcctcgtccttaaagccaagtccaaggcatgctcct

SEQ ID NO: 27475 - DNA, 65 bp, Mus musculus
gcctgattctgctggctggtctattgaacacatttacagagtccaggaactgagcctagcccata

SEQ ID NO: 27476 - DNA, 65 bp, Mus musculus
ggaagcatcctatgtttccttcatgcacctagactccatatgtctacgtaaagagcccctctaag

SEQ ID NO: 27477 - DNA, 65 bp, Mus musculus
cgtgctgccctaaatcttctggaatgtggggtgtctcggggcttcttgagatccaactatgaagt

SEQ ID NO: 27478 - DNA, 65 bp, Mus musculus
gtggcctggtccacacagggcaactgaggcaggcagcagcttgagcacatttcttcttgatctta

SEQ ID NO: 27479 - DNA, 65 bp, Mus musculus
ttgttaaggggcgaagacgtcctcccctcaatgtgttagcagaagagcaagaactgataagctat

SEQ ID NO: 27480 - DNA, 65 bp, Mus musculus
ttacagacattgtcgggttctggggattagcatagcaagaggaagggcatccacctaccacctac

SEQ ID NO: 27481 - DNA, 65 bp, Mus musculus
acactctggaagccttctcgcgacgtggacatcggtctctgacagtcctcctacagtgagaacat

SEQ ID NO: 27482 - DNA, 65 bp, Mus musculus
ccacgaccctaatttcctggtgtctataccagtgaaccctaaggaacaaatggagtgtaggtgtg

SEQ ID NO: 27483 - DNA, 65 bp, Mus musculus
tgggcactgtcacctaagagtaaccatggcgaatacatgcttgcttccagaggtctctgagtcca

SEQ ID NO: 27484 - DNA, 65 bp, Mus musculus
acactttttccacagccacgaagctctctgtacattcctgtacttgggagccctttcatcatgat

SEQ ID NO: 27485 - DNA, 65 bp, Mus musculus
gccactgaagatccttggaaagctaactacagaatgtactcttacgtcaccgaggagcttccaca

SEQ ID NO: 27486 - DNA, 65 bp, Mus musculus
ggtgctgttctccactcagagcccctgacagtgatggtgctcactgcaacagacccgtttgaata

SEQ ID NO: 27487 - DNA, 65 bp, Mus musculus
ctgatccaaagcagaactgggtgaaaagggctgtgaacctcctcagcctaagagtcaagaagatg

SEQ ID NO: 27488 - DNA, 65 bp, Mus musculus
tcacacgttccagtggatgtctggctgtgacctcggctcctccgcgggtacatgcagttcgctta

SEQ ID NO: 27489 - DNA, 65 bp, Mus musculus
agggcaattgggagcaggtccttctacatctgtgcctagaggaactcagtctacttaccagaagg

SEQ ID NO: 27490 - DNA, 65 bp, Mus musculus
ggaggttacctctcattcctctagaagaaaagcctatgtaacttcatttccataaccaatacttt

SEQ ID NO: 27491 - DNA, 65 bp, Mus musculus
ctggggacgttccagaagacagagatgcaaaggcagaaaagccgaccatgaagacagatgctatt

SEQ ID NO: 27492 - DNA, 65 bp, Mus musculus
ctcacaggaacgaagtccctaaagaaacagtggcagccaggtttagccccggaattgactggatt

SEQ ID NO: 27493 - DNA, 65 bp, Mus musculus
gttctgacatagcagtgtgtagaagaacaggccatcattttaagtgagacttggggtccaaagga

SEQ ID NO: 27494 - DNA, 65 bp, Mus musculus
tctgtcatgaactgcttgattactggggtcctgaagtaccctgaaacccgaggaacttagaagtt

SEQ ID NO: 27495 - DNA, 65 bp, Mus musculus
cttgcagtgtgaatgagagccagccacatgctgggccttacttctccgtgtaactgaacttaaga

SEQ ID NO: 27496 - DNA, 65 bp, Mus musculus
tgaaggataatgatcctcccattgctgtagcgaagatcgatgcaacctcagcatccatgctagcc

SEQ ID NO: 27497 - DNA, 65 bp, Mus musculus
ggatacagatgagcaagaagtggaggcaggactctgactctcaaagccgacattgtgtcaggata

SEQ ID NO: 27498 - DNA, 65 bp, Mus musculus
gaatgtgtacaggccaggagttcactgtgctgatgtggaagtgatagccacactgaagaatggac

SEQ ID NO: 27499 - DNA, 65 bp, Mus musculus
aaccggaagtgtgtcagagtgcagacagacagtctctcagctctgtactgtgagacagatgtgct

SEQ ID NO: 27500 - DNA, 65 bp, Mus musculus
gaattattttccgatgtatgtcccaaaacgtgtgagaactttcgctgcctttgcacaggtgaaaa

SEQ ID NO: 27501 - DNA, 65 bp, Mus musculus
tcctacggtctgatgtggtgcccatgaccgcagaaaacttccgctgcctgtgcacccatgaaaag

SEQ ID NO: 27502 - DNA, 65 bp, Mus musculus
ttgcctctgtctcagaatgaggctggataagatctcaggccttcctaccttcagacctttccaga

SEQ ID NO: 27503 - DNA, 65 bp, Mus musculus
tgggaagcaagaagagcaaatcaggtgcacagcagaaggctggtctccaaacccaaggtgctaca

SEQ ID NO: 27504 - DNA, 65 bp, Mus musculus
tgttctacttgggttggcagtgtttgattgcattgggtctgtctttcctggactgtggacgctcg

SEQ ID NO: 27505 - DNA, 65 bp, Mus musculus
aggccacagtaatgggaaatgccagagtggagaatcatacggagtgccactgtagcacttgctac

SEQ ID NO: 27506 - DNA, 65 bp, Mus musculus
gatgttaatgcaactaatggttgtgccagctattccctagaggtcctagacacacagactgcctt

SEQ ID NO: 27507 - DNA, 65 bp, Mus musculus
tgatggacctgtcactatagtcatcagaaggaccagcctccagtgcaagcagacaacagcttctg

SEQ ID NO: 27508 - DNA, 65 bp, Mus musculus
cctgtctagcaggcaattccatcccaaggatacatactcacttaaagatcacaactgattcctgc

SEQ ID NO: 27509 - DNA, 65 bp, Mus musculus
atggtctgggagagggaccagatgaggtgatagatacaggatcttggcaaacagcctagagctct

SEQ ID NO: 27510 - DNA, 65 bp, Mus musculus
tggaaagactgttccaaaaacagtggataattttgtagccttagctacaggagagaaaggatttg

SEQ ID NO: 27511 - DNA, 65 bp, Mus musculus
tacttgtcccctggtggcaaggccattcaccttaggaccttcccaccagttcctttgtaggcaaa

SEQ ID NO: 27512 - DNA, 65 bp, Mus musculus
ggtggggacaaatagatgcagtcggatggctttcatggaagtagtgtgcatgttcacatcatttt

SEQ ID NO: 27513 - DNA, 65 bp, Mus musculus
agtggagatagggctacttttaactaggtgacaggaatggccagacataggtgcagagccaccct

SEQ ID NO: 27514 - DNA, 65 bp, Mus musculus
ctggaatgtacagcgagcgagggatgttcaggtgagagtgaaacaaacgggaacagtggattgga

SEQ ID NO: 27515 - DNA, 65 bp, Mus musculus
ctcttggcccaggaacaatggctgccatgtcagaagactcttgcgtcaacttcaaggaaatgatg

SEQ ID NO: 27516 - DNA, 65 bp, Mus musculus
cctcaccagggtgatggtgtctcggagtgagatagatctgctcaacatccggagggaattcattg

SEQ ID NO: 27517 - DNA, 65 bp, Mus musculus
agtacatcgcagtgcacgtggtcccggaccagctcatgacttttagcggcacgaacgatccctgc

SEQ ID NO: 27518 - DNA, 65 bp, Mus musculus
agccttgcctctgccctccagcactagctgctgtactcagctctatagacagccactcccaagca

SEQ ID NO: 27519 - DNA, 65 bp, Mus musculus
tcatctctcaacaactgtgacacaggtcttcagggtgaagcccaaagcagctatcggttgcagca

SEQ ID NO: 27520 - DNA, 65 bp, Mus musculus
tgagagacccttgaagatccaggaggtattatccctgatgatcctttgagcaaccacagacctcc

SEQ ID NO: 27521 - DNA, 65 bp, Mus musculus
cactcgaatgtgtcaggtagtaacaggctgtccctgaaagaaagcagtgtctcaagagacttgac

SEQ ID NO: 27522 - DNA, 65 bp, Mus musculus
agtgccagaggcacctctacagcatcttgtgctgcaaagaaagctctgatcccaacagttgcaac

SEQ ID NO: 27523 - DNA, 65 bp, Mus musculus
actgagattctacatggtccaccttaacgatctggagacagtgctagcctctagaccacctcagc

SEQ ID NO: 27524 - DNA, 65 bp, Mus musculus
aacttcccgggttactacagggtctatgtcacagtgcctgtgagagaggacagagcactctgcag

SEQ ID NO: 27525 - DNA, 65 bp, Mus musculus
tacacacctagattcaggatgtgggcacgcagagagtcctttgatgacattactggagcacgtgc

SEQ ID NO: 27526 - DNA, 65 bp, Mus musculus
tccaatgaggagaatgggaccatcatgttctacaagggcttcctggcctactaccaggctgtaga

SEQ ID NO: 27527 - DNA, 65 bp, Mus musculus
cccatcatagcaattctcatcggcctggttcttggaaccttggtggtgggaactgtggtgatttt

SEQ ID NO: 27528 - DNA, 65 bp, Mus musculus
ggagaccactaagtgtcaaccactgtgctagtagaagggtgttgtgcgaaaagaagtgcagagag

SEQ ID NO: 27529 - DNA, 65 bp, Mus musculus
gattggatggtactacctctggtgtggaacccaatagaaaccacgtaggaccaacaaagagcaac

SEQ ID NO: 27530 - DNA, 65 bp, Mus musculus
ggtatccaggtagagacttgaggaagcatgaacaagaagaacaaggcaaggccaatggaaggaga

SEQ ID NO: 27531 - DNA, 65 bp, Mus musculus
cactggtgttctggaacctctgagacctgatgacaccttagccaagtgatagctctgcttacact

SEQ ID NO: 27532 - DNA, 65 bp, Mus musculus
ctcaggacatgaccttatttggatatgcagttggtgcgaccttcattagtggagctgaggtccac

SEQ ID NO: 27533 - DNA, 65 bp, Mus musculus
gtgaaaacaccctttgtggttgaggtccctgattggtgacagaaatggcggaagacaggaaacac

SEQ ID NO: 27534 - DNA, 65 bp, Mus musculus
actacctagggactatgatacccaccaaagaaccacgtcagcgatgcaaagaaaaccaggagagc

SEQ ID NO: 27535 - DNA, 65 bp, Mus musculus
ccccttcaagtctagctggattgcaaagttaagtttatgattatgaataaaaactaaataagaac

SEQ ID NO: 27536 - DNA, 65 bp, Mus musculus
aggtgtcacaactgctgccagagaaatttgcagagcagctcattcgggtgtactgtaagaagaaa

SEQ ID NO: 27537 - DNA, 65 bp, Mus musculus
gagtggaactgtcctgttttagactggagatactggagggctcacggtgatggataatgctcttg

SEQ ID NO: 27538 - DNA, 65 bp, Mus musculus
gccaaagtgtcagttttgctggtactagtttaatgcactggtaccaccagaaaccaggacagcaa

SEQ ID NO: 27539 - DNA, 65 bp, Mus musculus
tgggacggacgatcacaccctcatcagagtcgtggtgtcgaggagtgagattgacctgtttaaca

SEQ ID NO: 27540 - DNA, 65 bp, Mus musculus
aaattgatcgctaatttggaggtgatccctgcaggtccacagtgccctacggtggaagtcatagc

SEQ ID NO: 27541 - DNA, 65 bp, Mus musculus
agctggcaggttctggcctgctggactcagcttgcagatggccctgatctttgtagagatgcaag

SEQ ID NO: 27542 - DNA, 65 bp, Mus musculus
agctcacagcctcaaccccatcgttgttatttcctccttgtgtcacaggcttgctaggtagccaa

SEQ ID NO: 27543 - DNA, 65 bp, Mus musculus
acctgagagaagagatggaaagaacaagaaggaaaccctcactgtttggtcaaatccttgacacc

SEQ ID NO: 27544 - DNA, 65 bp, Mus musculus
ttcgaagaagaagcccactgatggcgacaagtcggaagagccctcaaatgtggaaagcagaggga

SEQ ID NO: 27545 - DNA, 65 bp, Mus musculus
agatgcacagtactccagacagcagctctgtacctgcctgctctgtccctcagttctaacagaat

SEQ ID NO: 27546 - DNA, 65 bp, Mus musculus
acagttgtcgatctctcccatccctccccacacctgattctgatgccctccattttctcccacat

SEQ ID NO: 27547 - DNA, 65 bp, Mus musculus
agaagaagagacctcctccatcaggcacacagattcaccagcagaaaggccctcctttacccaga

SEQ ID NO: 27548 - DNA, 65 bp, Mus musculus
ctgaggggagtagctgctgccatctcctgagacatacatggagacattttctgcccaaattccat

SEQ ID NO: 27549 - DNA, 65 bp, Mus musculus
aggtgtatgctcctgaggtgtcaccagagagtatcatggagtgcgccacaggaaaacggggcaca

SEQ ID NO: 27550 - DNA, 65 bp, Mus musculus
agtgtatgaagacatgtcctacagcaaccgcaagacgccatgcatccccaaccagtaccagtgaa

SEQ ID NO: 27551 - DNA, 65 bp, Mus musculus
gaacagctgtcagtgaaccaggaagccatagagattctggacaagatttctcagccagtggtagt

SEQ ID NO: 27552 - DNA, 65 bp, Mus musculus
gagtcccctgttgaaaacagtgcagtgttagcatagagacagacacattctcctctcacgtgccc

SEQ ID NO: 27553 - DNA, 65 bp, Mus musculus
aaggttcctgggaagctggtgcaatgccatcatgaggtggtgcaaagcaggtctcctttagagaa

SEQ ID NO: 27554 - DNA, 65 bp, Mus musculus
tgagggtattttacgttgcactgcggtcgtttaaagtcgtacatgaaaaccatgcgttacgactt

SEQ ID NO: 27555 - DNA, 65 bp, Mus musculus
cagcaaccccactgattcagacaaccagaaaagacaaagccataatacacagatgacagagctct

SEQ ID NO: 27556 - DNA, 65 bp, Mus musculus; identical to SEQ ID NO: 23716

SEQ ID NO: 27557 - DNA, 65 bp, Mus musculus
gtcagatgcatacgagcgtatttactgtatcgtgtttgtgggaggagtgatgggtgagaggggct

SEQ ID NO: 27558 - DNA, 65 bp, Mus musculus
aagcctcaggtagatgactttgacaacttggccctgacagtggaactgttcccttgctccatgga

SEQ ID NO: 27559 - DNA, 65 bp, Mus musculus
gcactagcgtcttaacactgctacactggtggtaggtctcatgtcaaccctgcagatttcaagag

SEQ ID NO: 27560 - DNA, 65 bp, Mus musculus
ctcggcaaacctagtgcgttatgcctaagcatatcagtttgtggacattcctcactgtggtcaga

SEQ ID NO: 27561 - DNA, 65 bp, Mus musculus
gctgggcaaactaagcttcctaacaaggagataatgagccacttggatcacatgaaatcttggaa

SEQ ID NO: 27562 - DNA, 65 bp, Mus musculus
aacagagttaccaactcatcaaacaagttcaatctcaagtgtggctcagcagatcccgtgtgctc

SEQ ID NO: 27563 - DNA, 65 bp, Mus musculus
tggtgtctcgagtaaagccctacgctcgaatggaagagtatgagcggaaccttggggagatggtg

SEQ ID NO: 27564 - DNA, 65 bp, Mus musculus
tacaattcattttggattggactaaggtacacattgccagacatgaactggaagtggataaatgg

SEQ ID NO: 27565 - DNA, 65 bp, Mus musculus
aaggtaccaagaaccgcatcatcacagcagaagggatcatcttgctgttctgtgcagtggtgcca

SEQ ID NO: 27566 - DNA, 65 bp, Mus musculus
catcagggttgagaaaggacactggattgagcttctgaaatgccgctggtagctctgtaacatgg

SEQ ID NO: 27567 - DNA, 65 bp, Mus musculus
caccctaagagagcctaaaactctccaagttctgaatattctgcccaggactctgagatggaccc

SEQ ID NO: 27568 - DNA, 65 bp, Mus musculus
gccagtccagatcaaacagaaatgaccattgaaggtttgcaacccactgtggagtacgtggttag

SEQ ID NO: 27569 - DNA, 65 bp, Mus musculus
ctgctttaccacggagttccaagtggcttacagctctgaccaaaccaactggcagatcttcagag

SEQ ID NO: 27570 - DNA, 65 bp, Mus musculus
gcattttctggaagaatcacaggcttcaatatctgggatcgggttctcagcgaggaggagatacg

SEQ ID NO: 27571 - DNA, 65 bp, Mus musculus
catgctgcagctcggggctgacggcaagacaaagaagcagctctccacggtgatgcgatataatg

SEQ ID NO: 27572 - DNA, 65 bp, Mus musculus
gaaacagccattcgatcctgagaacactgaggaagctgagttccatgtggacgagtccaccacag

SEQ ID NO: 27573 - DNA, 65 bp, Mus musculus
ttccttctgccaaaatcaactgcccagagggtgccaacgcctatggttcctactgttattatcta

SEQ ID NO: 27574 - DNA, 65 bp, Mus musculus
ggggctcaaggatctactaggaaagaaatccgccattcaatgggatatgagggtctgaaaggtgg

SEQ ID NO: 27575 - DNA, 65 bp, Mus musculus
gctatctggcaaatggtttctcattgctgtggctgactcagaccctgattataggcaggaaattc

SEQ ID NO: 27576 - DNA, 65 bp, Mus musculus
actctgccccagctggaaatccgaggatcctacaatctgcaggacctgctggctgaggacaagct

SEQ ID NO: 27577 - DNA, 65 bp, Mus musculus
gatgaattactttaactgggagaggaacccatctactgccttagaccgtgctttctgtggcagct

SEQ ID NO: 27578 - DNA, 65 bp, Mus musculus
cagcagcatcctccgctgagggcatcattcctctctgcttaggtggtggcccatcatggttctgt

SEQ ID NO: 27579 - DNA, 65 bp, Mus musculus
gagcctgggctgctaaagtcatcagcgatgccagagaggctgttcagaagttcacgggacatgga

SEQ ID NO: 27580 - DNA, 65 bp, Mus musculus
atggggatccttcctctactgtcaaccgtggtcactgtgggagtctgacagcaagttcagggttt

SEQ ID NO: 27581 - DNA, 65 bp, Mus musculus
tgcctgattggacagtgacacttaccaactctgtcacgtcctcatgcagagaaagaagcctatgg

SEQ ID NO: 27582 - DNA, 65 bp, Mus musculus
tgcctacagctcctattgttactacttcactgaagaccgtttaacttgggctgatgcagatcttt

SEQ ID NO: 27583 - DNA, 65 bp, Mus musculus
agaagccattcgatcctgagaacactgaggaagctgagttccacgtggacgagtccaccacggtg

SEQ ID NO: 27584 - DNA, 65 bp, Mus musculus
ctgcaggaaaccatctctccctctggacagggtgtctgataagtcaccttcttaccaacttgttt

SEQ ID NO: 27585 - DNA, 65 bp, Mus musculus
ggcttgagattctaggatgtgaggcccagcagcaatactgaggtagcctctgcatcacctgctta

SEQ ID NO: 27586 - DNA, 65 bp, Mus musculus
tcaaagcatgggcatggaggatgccttcaacaagggcaaggccaacttctcaggaatgtctgaga

SEQ ID NO: 27587 - DNA, 65 bp, Mus musculus
tggtcgatgcctttgatccacagaaggctgacttctctggtatgagcagcactcaaggtcttgtg

SEQ ID NO: 27588 - DNA, 65 bp, Mus musculus
ccacctggatcagcctctcagctcctgtgactctttctaaccagctttgtgggatagggtgggac

SEQ ID NO: 27589 - DNA, 65 bp, Mus musculus
gctatgtcgagaatgcctcatcttagccttgggaactctaacttggaaactgcactggggaccag

SEQ ID NO: 27590 - DNA, 65 bp, Mus musculus
tcttgtgggcagtgaggggaaggacaggctggcctgaggttcacagtcattccagtgagctctga

SEQ ID NO: 27591 - DNA, 65 bp, Mus musculus
taccttggagaaaggacctactatgtggcagccgtagaggtggaatgggattactcaccaagcag

SEQ ID NO: 27592 - DNA, 65 bp, Mus musculus
tgggagtctgctacggggattgtagagttctggattgatgggaaacccaaggtgcggaaaagtct

SEQ ID NO: 27593 - DNA, 65 bp, Mus musculus
acaccatcctagggatctgcaagacagacaagatgcttccccgtataaccatcaccatcatgtcc

SEQ ID NO: 27594 - DNA, 65 bp, Mus musculus
cttaccaccaacttgataaacgacacaatagagcttcgggagtctcaaacaataggtgaccagtg

SEQ ID NO: 27595 - DNA, 65 bp, Mus musculus
tgtctgaagctgagatccaccagggtttccagtacctcaattcccttctccagcagtctgacact

SEQ ID NO: 27596 - DNA, 65 bp, Mus musculus
gcatggatgctgatggtaacaagcatttccttaacactccctggaagaagaactgcacgtggtgt

SEQ ID NO: 27597 - DNA, 65 bp, Mus musculus
acaaatgacaccatgggtaaagtagccaacgagtccttcagccagcacagccagccagctgctca

SEQ ID NO: 27598 - DNA, 65 bp, Mus musculus
ttttacccagatcgctactatgagaaagagatgcagtgcgcaggtacgcgtgatgggtccattga

SEQ ID NO: 27599 - DNA, 65 bp, Mus musculus
tcaaagcttaccttgtaagtaatgaaccaatggaaggtgccttcaactatgtacaaacccgctgc

SEQ ID NO: 27600 - DNA, 65 bp, Mus musculus
ggctttgttgttgctggaccatcaaggtatacatgcaaggaagactcctggacacctcccatttc

SEQ ID NO: 27601 - DNA, 65 bp, Mus musculus
gtactggactgtcactatcctgaggatgagattggacacgaagatgaggccgagagtgatatttt

SEQ ID NO: 27602 - DNA, 65 bp, Mus musculus
cctccacctattgacaatggagacatcacctccttgtcattaccagaatatgaaccattatcatc

SEQ ID NO: 27603 - DNA, 65 bp, Mus musculus
cgccaattacagtccccacccatgttttgtggtagggaggcgcgaccgcacagagagaggacggc

SEQ ID NO: 27604 - DNA, 65 bp, Mus musculus
aaacagattgcctgcagttaccaacctttgtaatgctggcaccaatgttcatgataataaatatc

SEQ ID NO: 27605 - DNA, 65 bp, Mus musculus
gcgaagaacttggggcattcacagaatctatggtggtttatggttgtcccaactgactacagccc

SEQ ID NO: 27606 - DNA, 65 bp, Mus musculus
aaaagtgccaggagatcttgtctgtggactgttcaaccaacaatcctgcccaggctaacctgcgc

SEQ ID NO: 27607 - DNA, 65 bp, Mus musculus
acctgcaatctgcgcacgtaccatgacggggtagtcaccattaacatgatgtgtgcagagagcaa

SEQ ID NO: 27608 - DNA, 65 bp, Mus musculus
cactgtgtgaagcgctacaggggcagaagctggtggtggaagagaaacggtcatgtctacatgtg

SEQ ID NO: 27609 - DNA, 65 bp, Mus musculus
agcacaagctgatgagttacgactttgtgaaatggatagccttgaggggaggcgaaaacaggtcc

SEQ ID NO: 27610 - DNA, 65 bp, Mus musculus
tatgcaatgcagcaaacgaagctcctcacagaccaggctgtggataaggactccttctactgcag

SEQ ID NO: 27611 - DNA, 65 bp, Mus musculus
tatggaatggtggttacctaccgctgcaacactgatgcgagagggaaggcgctctttaacctggt

SEQ ID NO: 27612 - DNA, 65 bp, Mus musculus
acactgtggaggctcattgcagagatggcactatcgagattccctcgtgcttcaaggagcacagt

SEQ ID NO: 27613 - DNA, 65 bp, Mus musculus
catcaccaccactgctgctggtgctgtcactatcgctggtgctgttgttccaaactgtgtgcgga

SEQ ID NO: 27614 - DNA, 65 bp, Mus musculus
gacagttttgcatgcgatgctatcacttattggctacttgacatagccaaccaagagttaagaag

SEQ ID NO: 27615 - DNA, 65 bp, Mus musculus
ggtagaacgtagctgggacacattaccagcagccatcattctcctgcttctcttttgccctggac

SEQ ID NO: 27616 - DNA, 65 bp, Mus musculus
caaatggaatccagaagggatttcaacctgggaaaacctatcgatttggggctactgtgactctg

SEQ ID NO: 27617 - DNA, 65 bp, Mus musculus
gggccctgaaggtgtacaagctgtttctagagatcgaacgattggaacatcagaaagagaagtgg

SEQ ID NO: 27618 - DNA, 65 bp, Mus musculus
cgagccacgaaacattctgtgagaaatcatgtgttgctccagaaagactgagttttgcatccctc

SEQ ID NO: 27619 - DNA, 65 bp, Mus musculus
ccagctgctacctcatttctaccaaggagaacttctggagcaccagtgagcagaactgtgttcag

SEQ ID NO: 27620 - DNA, 65 bp, Mus musculus
tagcagtcaagaaggggagccagctagtgagaagatcgcccagaggcatctgggacggtgtggga

SEQ ID NO: 27621 - DNA, 65 bp, Mus musculus
taggaccttcaacctatcatcgcaagcatgcaagcaggaatcctcctcagaatcgagtccatgga

SEQ ID NO: 27622 - DNA, 65 bp, Mus musculus
catatggaaaggccggtcaaacttcagttcctaacagattgtgatctagtccactcttcctggag

SEQ ID NO: 27623 - DNA, 65 bp, Mus musculus
ggagactccctgacaaagcacaacaacatgtcatttacaacccatgaccaagataatgatgcaaa

SEQ ID NO: 27624 - DNA, 65 bp, Mus musculus
aaccttagtttccgcctgtacgaccagtggcgtgcttggatgcagaagtcacacaagacccgaaa

SEQ ID NO: 27625 - DNA, 65 bp, Mus musculus
tatttcctgggacttgctgatgagaatgtggaaggccaatggcagtgggtggacaagacgccatt

SEQ ID NO: 27626 - DNA, 65 bp, Mus musculus
cagttccagggatggcagggacagcgtgcatatccccaccgtaatagtttgctcagttcttaaca

SEQ ID NO: 27627 - DNA, 65 bp, Mus musculus
aggcacatgccaggccttacccccggacagcagggctctcgggaaccctcagtgcctttaataaa

SEQ ID NO: 27628 - DNA, 65 bp, Mus musculus
cctgttaaactttactgctgctatggagtgatcatggtcctcactgtagctgtaattgctctttc

SEQ ID NO: 27629 - DNA, 65 bp, Mus musculus
agcctgacgcttggcacccagatacatggtgactaggattcccttagcacaaatgcttagccaag

SEQ ID NO: 27630 - DNA, 65 bp, Mus musculus
tgaatgcagagtgtctctgggagactcagtcccttgtgaccattattgccacaactacttgggcg

SEQ ID NO: 27631 - DNA, 65 bp, Mus musculus
ctgggtgcctgatgaagcagctccctgtgcctacaagggttcagaataaaccaggaaggcctaaa

SEQ ID NO: 27632 - DNA, 65 bp, Mus musculus
tgctattcctgtgaagatgatctgcctctgagccttgtaccctgtagtgacaccaccggactcta

SEQ ID NO: 27633 - DNA, 65 bp, Mus musculus
attcgagcatgggtggcatggcgagcacactgtcaaaaccgagatctgtcccagtatattcggaa

SEQ ID NO: 27634 - DNA, 65 bp, Mus musculus
gatgtgtgcttcctcctgcgacttcgttaagcggcactttttctcagactatctgatggggttca

SEQ ID NO: 27635 - DNA, 65 bp, Mus musculus
gacaacaaagtccgacacaacaaacaagtaacaagaatcatcaaaactacacctacagaccagag

SEQ ID NO: 27636 - DNA, 65 bp, Mus musculus
gggcgcgccaaaacacctcggggccaaaaaagcaccctctttaaaaaggccactagcgactaaaa

SEQ ID NO: 27637 - DNA, 65 bp, Mus musculus
ccatgatgaatgtaactgtgccatgatgtcagcttctggtctcacagcagacaactgtacaactt

SEQ ID NO: 27638 - DNA, 65 bp, Mus musculus
tatcacagacatgaaagaagacctcagcactgactatgcctgcatcgccaggagcacacccactt

SEQ ID NO: 27639 - DNA, 65 bp, Mus musculus
gatccagagctggaatagcaactcagtttagcactgccaatggacaggtgaaccttcggggacca

SEQ ID NO: 27640 - DNA, 65 bp, Mus musculus
tttggcaaaggtcccagaccagttgtgtatcttcagcacggcttgctggcagattctagtaactg

SEQ ID NO: 27641 - DNA, 65 bp, Mus musculus
cctgtcctgagtctgaatactgactttccatgtactgggctgctccgaagcactggataattcac

SEQ ID NO: 27642 - DNA, 65 bp, Mus musculus
cagaaaccgtctggtggcttcctttagtgtgtcgtaaatctccacctctcctggaatgcagcctg

SEQ ID NO: 27643 - DNA, 65 bp, Mus musculus
atggtctgagctgtgttttgggcagaccaatcttctatcagtcacagaaaacaacctgttaattc

SEQ ID NO: 27644 - DNA, 65 bp, Mus musculus
ggcaatgggttgggccacgagttcctgaatgatggccccaagcggggacaatcaagattctgaat

SEQ ID NO: 27645 - DNA, 65 bp, Mus musculus
atcgatgccaagggtgtccttcgccagatcacagtcaatgacctacctgtgggacgctctgtaga

SEQ ID NO: 27646 - DNA, 65 bp, Mus musculus
gctttggtacggagtctatgactcatgctgatgcacaggacaggattaaagcagcgtcctaccag

SEQ ID NO: 27647 - DNA, 65 bp, Mus musculus
agcccaactggcctctactcatccgaaaacatctctaacttcaacaatgctgtggagtcgaagac

SEQ ID NO: 27648 - DNA, 65 bp, Mus musculus
gacgcacgattgggtgctgaggccgcttacgcgtcgcgcttcctcgtctgctccgcatgtccagg

SEQ ID NO: 27649 - DNA, 65 bp, Mus musculus
atgaatgaagtcagattaggagcctcagggcaaggtgcagaagcgagctggaaatactcttctag

SEQ ID NO: 27650 - DNA, 65 bp, Mus musculus
gcggtctagtacgcggactgcctggtaaaccctcacaggtcctctgtggtgcacacagcccacct

SEQ ID NO: 27651 - DNA, 65 bp, Mus musculus
tggaggctccgttgcccaaagcagtcacgcagtcagcggagatcaccattccggttactttcgag

SEQ ID NO: 27652 - DNA, 65 bp, Mus musculus; identical to SEQ ID NO: 23716

SEQ ID NO: 27653 - DNA, 65 bp, Mus musculus
attgagaagcagaatctggaaggtgatcataacgatgccgctatggagacggaagctcctaagag

SEQ ID NO: 27654 - DNA, 65 bp, Mus musculus
tccggaggaactcaaagtcaaggttctgggggacgtgattgaggtccacggcaagcacgaagaac

SEQ ID NO: 27655 - DNA, 65 bp, Mus musculus
gctgacaagcaacacagtgagagacctacagcatgtgcaaagagaaggtggtgttgtatcctgag

SEQ ID NO: 27656 - DNA, 65 bp, Mus musculus
tctcaagggcaagctcagcgaggctgacaagaagaaggtgctggacaagtgccaggaggtcatct

SEQ ID NO: 27657 - DNA, 65 bp, Mus musculus
cacagtcatgaacacctttgctcacaagtgccaactaccagaggatgtggacccaacatcggtga

SEQ ID NO: 27658 - DNA, 65 bp, Mus musculus
ttcgggctagcctggctaaatggcatccaatcctccacccacttgttgctattagttacctctct

SEQ ID NO: 27659 - DNA, 65 bp, Mus musculus
cccagcccggcccagaatgaaaaaggcaggcaatgatctccctctgaggccctttcaagccctca

SEQ ID NO: 27660 - DNA, 65 bp, Mus musculus
aggagatcccctggacctctggctccattgacatcagatggctggcttacagtcacagtacttgc

SEQ ID NO: 27661 - DNA, 65 bp, Mus musculus
tgacaatctccaataggcttgtgtcttcaccctgctgcattgtgacaagcacctatggctggaca

SEQ ID NO: 27662 - DNA, 65 bp, Mus musculus
gcctcccttttataataaacagatgatgcctaaactgacagccattgtctctgacctttagtttc

SEQ ID NO: 27663 - DNA, 65 bp, Mus musculus
ttcaaagttcgattcccagacagattaaccccacagacacggcagatccttaagcagcacctccc

SEQ ID NO: 27664 - DNA, 65 bp, Mus musculus
gccatagaagccgggattcttgttgggaaagagagcacgtcaggagatgactctgtcatgataga

SEQ ID NO: 27665 - DNA, 65 bp, Mus musculus
ggagaagaccttttcatgtgtatggacatacagctggttgaagcattgtgcggcttccaaaagcc

SEQ ID NO: 27666 - DNA, 65 bp, Mus musculus
ctgcagagttcctcagaagttggttatgacgccatgcttggagattttgtgaacatggtggaaaa

SEQ ID NO: 27667 - DNA, 65 bp, Mus musculus
atttgggggtggcttcgcttcgttagatactggattcacatccttcggttctccaggaaactcgg

SEQ ID NO: 27668 - DNA, 65 bp, Mus musculus
agaaggtcggagctgaaaggaatgtgctcatttttgacttgggaggtggcacttttgatgtgtca

SEQ ID NO: 27669 - DNA, 65 bp, Mus musculus
gccagaaggacatactatgaagcttgggactaaagggacttcctgagcagaaaaggggcagactt

SEQ ID NO: 27670 - DNA, 65 bp, Mus musculus
ccccttcactcgttgatggcacagactcagctcaaggctgaagatgtgagtgccattgagatagt

SEQ ID NO: 27671 - DNA, 65 bp, Mus musculus
caaggaggaccagtatgaacacttggatgctgctgacgtgacaaaggtagagaaaagcaccaatg

SEQ ID NO: 27672 - DNA, 65 bp, Mus musculus
acaagcagaaagagcttgagagagtgtgcaaccccatcatcagcaaactttaccaaggcggtcca

SEQ ID NO: 27673 - DNA, 65 bp, Mus musculus
gctgggtcaagcagaaaggaggcggaatcttctccatttgttgagagacttctgaagaagggcta

SEQ ID NO: 27674 - DNA, 65 bp, Mus musculus
ggccttacgtcttccattccggacatgattcttggacatcttttcagccaggaagagctttctgg

SEQ ID NO: 27675 - DNA, 65 bp, Mus musculus
tgatgtcagatgacaaaatggaagccaagacaccttgaaggtgactttctaggaaggtcttaagc

SEQ ID NO: 27676 - DNA, 65 bp, Mus musculus
ttgcccaccacctccaggctatttatagttgtcggttcacagacaaagatccacagtgggtaccc

SEQ ID NO: 27677 - DNA, 65 bp, Mus musculus
gccctcctgtacctatacgcagccatcgcagatgtgagcttcatctctcctaaactacagatggt

SEQ ID NO: 27678 - DNA, 65 bp, Mus musculus
accagactggatcctcagccctgaagtgtgcccttccagccaggtcataccctgtggaggtgagc

SEQ ID NO: 27679 - DNA, 65 bp, Mus musculus
atatcacggtcatctgtccctgggaagcgttcagccatctggagctgcatgagcttgctcagttc

SEQ ID NO: 27680 - DNA, 65 bp, Mus musculus
atgactgtgatccttccaggaatggacagccggaagcagaggatgaaagtccagccacaaaatga

SEQ ID NO: 27681 - DNA, 65 bp, Mus musculus
cgggcactaggaacatggcatcagtggtcttagggtagcactttgtcaggaatgaacagtcatca

SEQ ID NO: 27682 - DNA, 65 bp, Mus musculus
gtcaggtgctgaggtaagtgaacagcatgttacaaccagggcagatccattagcttctctgaaaa

SEQ ID NO: 27683 - DNA, 65 bp, Mus musculus
agatctgggaggtgagacctgtgctaaggccagtgtcttgcctgtcccttcagatgtcactgtct

SEQ ID NO: 27684 - DNA, 65 bp, Mus musculus
atgaacatgagaccctgttagcacgctggcagaacaagaacacggagagcatcattgagctgcag

SEQ ID NO: 27685 - DNA, 65 bp, Mus musculus
agctggcagacctgattcagcagctcagcgagaagtttgggaagaatctgaacaaagaccacctg

SEQ ID NO: 27686 - DNA, 65 bp, Mus musculus
ccgatcctttgtccacgtcattgctagtggtggagaataggaattctgtttcactaagccctagc

SEQ ID NO: 27687 - DNA, 65 bp, Mus musculus
gttgcatccaagagcagacgagagaccatcactgagtagcatacgttctcatccaaacgctgaag

SEQ ID NO: 27688 - DNA, 65 bp, Mus musculus
cctggtgtggaacatgaagcccgtgtgcccaagaaaatcctcaagtgcaaggcagtgtctcgaga

SEQ ID NO: 27689 - DNA, 65 bp, Mus musculus
ctcaggcacagacatagccaaaagtccatacacccattgccaggcactcccataagtcacatgtg

SEQ ID NO: 27690 - DNA, 65 bp, Mus musculus
cactccaaccaggtcaccatgcaactgtgtctccatgtggagcaagcaagactttcggtctagac

SEQ ID NO: 27691 - DNA, 65 bp, Mus musculus
tgtccaagtatgagtccgggcatgaagatgcagctgagggctcttaaaggaggagtccttgtgag

SEQ ID NO: 27692 - DNA, 65 bp, Mus musculus
aagagaagctgggaacctgactaaagccacagcttcagaccagaagagtagtggaggcaaggaca

SEQ ID NO: 27693 - DNA, 65 bp, Mus musculus
actttgtagctgcccagaatactgtgcagtgccattagagacctgagtttctgtcaccccgtagc

SEQ ID NO: 27694 - DNA, 65 bp, Mus musculus
attaaggagctggaagcatcagaagagctggacacgatctgtcccaaagcacccaagttagagga

SEQ ID NO: 27695 - DNA, 65 bp, Mus musculus
actgccactgtgtgcacctgactgatgagtaggatcatgcctctcacctcacacgtttgggcagt

SEQ ID NO: 27696 - DNA, 65 bp, Mus musculus
cagatttccatagttgaccaggaattagtgcctcacactcaattacctgcatcagtttctcacta

SEQ ID NO: 27697 - DNA, 65 bp, Mus musculus
ctgctggatcgcctgttctttgccccaacttttctgctgctgttcttcttcgtcatgaacttgct

SEQ ID NO: 27698 - DNA, 65 bp, Mus musculus
gagtccaaagacatcctggtaacttctgaagatggtatcacgaagatcacgttcaatcggcccac

SEQ ID NO: 27699 - DNA, 65 bp, Mus musculus
cccaggcttcatttcatgcccggcgtctcttcgctcacaccgctgcaggctgtttgaggcttctc

SEQ ID NO: 27700 - DNA, 65 bp, Mus musculus
gatactgactggcagactgcttacttagctagcatcagagcactaactactgaaagggaaaaatt

SEQ ID NO: 27701 - DNA, 65 bp, Mus musculus
ccgcccacatcttgagtaggaataacccgatcatgcatagctgaaacttgcttacagtatctgag

SEQ ID NO: 27702 - DNA, 65 bp, Mus musculus
gccaggactgttagctcgctttgagccagaagtgaaagcatttctgtggcttttcctatggaggt

SEQ ID NO: 27703 - DNA, 65 bp, Mus musculus
ccatggtttgcaccttgtactgatgcaccgtgaccctggaatgcttggacagcttcttcaaacta

SEQ ID NO: 27704 - DNA, 65 bp, Mus musculus
agtcagcgagattcaccatcacagaacagcaaggggctttaagatggatgtctcaatggggaggg

SEQ ID NO: 27705 - DNA, 65 bp, Mus musculus
agtctctaaagcgacatcctcccttgctcctggacaccgtgaagaacttctgtgacatcctgatc

SEQ ID NO: 27706 - DNA, 65 bp, Mus musculus
gatgaatgcacaagtgcggtcagtgtggatgtggaggactacatttacagccactgtcgaaaggt

SEQ ID NO: 27707 - DNA, 65 bp, Mus musculus
ctgttcatggaagctgcaattcttcaggaccctggagacgctgaggcatggcagtttcttggtat

SEQ ID NO: 27708 - DNA, 65 bp, Mus musculus
accaaggtgcagatggcctgggatcgtcactcctcacactcaagacactggactacgtgaagtgt

SEQ ID NO: 27709 - DNA, 65 bp, Mus musculus
gaagagttggccagagtcatgtgttctatggtggcagcaaggagggtcagttcatatgcctctgc

SEQ ID NO: 27710 - DNA, 65 bp, Mus musculus
tttaaagggtgtttctaagcatcccctcagtgcccacagagcaaggagtgcaagttagctcatag

SEQ ID NO: 27711 - DNA, 65 bp, Mus musculus
ccagagagtttgagaggtttcaggagatgtgttacaaggcttacctagcaattcggcagcatgcc

SEQ ID NO: 27712 - DNA, 65 bp, Mus musculus
agcacttccgggtgaagttcaacgaagctctccgagaaagctggaaaaccaaagtcaactggctg

SEQ ID NO: 27713 - DNA, 65 bp, Mus musculus
ctggtggcgttgagatctataatggggatcgcaagataaaggtttccaacaccctggaaagccgg

SEQ ID NO: 27714 - DNA, 65 bp, Mus musculus
gatacaaactgcagatgattgaggtgcctgtcctctcggatgactccgtccccattggcgtgctg

SEQ ID NO: 27715 - DNA, 65 bp, Mus musculus
ctaatggaaccaaacctctggatggcttcaacatgtggaagacaatcagtgaaggacacccatcc

SEQ ID NO: 27716 - DNA, 65 bp, Mus musculus
aacagtaaggtggaagccaatctcctttcaagcgaggagtccctttcagcctcagagctgtcagg

SEQ ID NO: 27717 - DNA, 65 bp, Mus musculus
cgccagcttaaggacaacacctgtgtggtggaatttcagttcatgctgcccacatcccatccaaa

SEQ ID NO: 27718 - DNA, 65 bp, Mus musculus
agatccagacactcaagtacaccatcaagtacatcggggaactcacagacctcctcaacagcagc

SEQ ID NO: 27719 - DNA, 65 bp, Mus musculus
cagcccaggaacagtcccatgacaataagcagattgctgttggaggaggacagccagagtactga

SEQ ID NO: 27720 - DNA, 65 bp, Mus musculus
cggcacgagagaaagtaccatgtcgaccagccgcaagctaaagactcatggcatgaggagaggca

SEQ ID NO: 27721 - DNA, 65 bp, Mus musculus
tacgggtatctgctgacacctgcaacacctgcgaggctgccttgctcgatgtagacttcaacaag

SEQ ID NO: 27722 - DNA, 65 bp, Mus musculus
cagagactgcctgctagggaggagagcatactgagatgagcgagagagcaagcacaggcttgggc

SEQ ID NO: 27723 - DNA, 65 bp, Mus musculus
gccctgccattgtggtagggtagcattttcatggatagttgaagaatctcctaaatcgtgatagt

SEQ ID NO: 27724 - DNA, 65 bp, Mus musculus
tggtcgggtcacgcttttccccaaagacattcagttgaccaggagaatccgaggcttcgagggcg

SEQ ID NO: 27725 - DNA, 65 bp, Mus musculus
agtccacggaccaccccaagtattcagacatgatcgtggctgctatccaggcagagaagaaccgt

SEQ ID NO: 27726 - DNA, 65 bp, Mus musculus
atccctttcaggcaacattggcgaaggacccagaaaccgcagagcttgtccccatggatcttata

SEQ ID NO: 27727 - DNA, 65 bp, Mus musculus
ttactttgccatggtcaagaggtacctgacctccttccccatcgatgaccgagtgcagagtcaca

SEQ ID NO: 27728 - DNA, 65 bp, Mus musculus
aactttgtgtggcaacttctggttttctgatggtccccagtgagagaaatctgacagtacactgg

SEQ ID NO: 27729 - DNA, 65 bp, Mus musculus
gacacaggcgctgctctcgtaagaggctacataggatccacaagaggcgtcggtcatgcagaagg

SEQ ID NO: 27730 - DNA, 65 bp, Mus musculus
aaaacaagtctgcaaagtcagaaatctgaaagcttatccatgacagctaaaggcctatgcaggag

SEQ ID NO: 27731 - DNA, 65 bp, Mus musculus
acgccctgctatatctgttttctgaagactcaggaggattcaacctgcacttctgactggtcttc

SEQ ID NO: 27732 - DNA, 65 bp, Mus musculus
ggcccacagtcatgctactcccatttaggaacatgggcttaccagctcaagacttatctaaccct

SEQ ID NO: 27733 - DNA, 65 bp, Mus musculus
ttcatgatcccctgcaacatctgcttgatcctcttggctacttctacgttgggctttgcggtgct

SEQ ID NO: 27734 - DNA, 65 bp, Mus musculus
ttgccctggcaaatgtacacacctcatgctagcctcatgaaactggaataagcctttgaaaagaa

SEQ ID NO: 27735 - DNA, 65 bp, Mus musculus
agccaccgagtggcaagattcctcaggtctcccaagaagcaaaggggacgcagacaggaggggtg

SEQ ID NO: 27736 - DNA, 65 bp, Mus musculus
tggcgttggagtagtgattgaagcgacacacatgtgcatggtaatgcgaggcgtgcagaaaatga

SEQ ID NO: 27737 - DNA, 65 bp, Mus musculus
gagactactctctgagaaggccgctgaagtgaacactagggatgaagatgagtatacccctcttc

SEQ ID NO: 27738 - DNA, 65 bp, Mus musculus
gccagtcccattgctatgaattggaagaacactgggttggcagaggtctgctgtacgagctactt

SEQ ID NO: 27739 - DNA, 65 bp, Mus musculus
cagagtcccagaaggaacagcacagtgacctggacaagtcttctatccacagctactgaggcctc

SEQ ID NO: 27740 - DNA, 65 bp, Mus musculus
cgagaagtcaaccatccaaaactctgtttgtcaaaggtctgtctgaggataccactgaagagacc

SEQ ID NO: 27741 - DNA, 65 bp, Mus musculus
cagacggaacaatgatgacagcggtctggttttataagttggcatctgtcacaatatcggattgc

SEQ ID NO: 27742 - DNA, 65 bp, Mus musculus
gacagtacctggatgaagatatgctcctgaaagtgctggagtacctcaaccaagagcaggcagag

SEQ ID NO: 27743 - DNA, 65 bp, Mus musculus
ccctcctcatcatgacttcctatagctatcgccagacctcagctatgtcttcctttgggggtacg

SEQ ID NO: 27744 - DNA, 65 bp, Mus musculus
aacttgggaaggatgactctcctgtggcctcacactgctgcctgtctgtctgtcactttctatct

SEQ ID NO: 27745 - DNA, 65 bp, Mus musculus
aggctggccttgtggtaaagctgctaatgaagttaaatggacaactaatgccctctgaaagaaat

SEQ ID NO: 27746 - DNA, 65 bp, Mus musculus
ttgaagaagagatgtaaggcctcacacgggctcctctgggatgcgaagtttccagccaggagtta

SEQ ID NO: 27747 - DNA, 65 bp, Mus musculus
ggagcttcagcagcagcagttttggtggaggacttggtagtggatttggtggtcgatttgatgga

SEQ ID NO: 27748 - DNA, 65 bp, Mus musculus; identical to SEQ ID NO: 23716

SEQ ID NO: 27749 - DNA, 65 bp, Mus musculus
ctcgtgagccctgtttcaccttgccccttccagcaatcaataaagcttcattagctgagttgcac

SEQ ID NO: 27750 - DNA, 65 bp, Mus musculus
tgaagctaggatggtctcctggtgctcactttagcagacagtgtccacaatgtgaatcccacttc

SEQ ID NO: 27751 - DNA, 65 bp, Mus musculus
tatcaccagcctttgtgaatggctccacagctcctatccctgggacatcctgtcagtttggttat

SEQ ID NO: 27752 - DNA, 65 bp, Mus musculus
tgtaagcagtccattccattgcttgtttctcaaagcagcgagatacctgtctgagctgcaggagg

SEQ ID NO: 27753 - DNA, 65 bp, Mus musculus
ctgcctggattttgcagtcaaagtcaggttgatctgaagccgaattcgttctgatgcctgacccc

SEQ ID NO: 27754 - DNA, 65 bp, Mus musculus
atatctgtgaggtggagaaggagatcgccctgctgaaggcacagcatgagcagtatgttgcagaa

SEQ ID NO: 27755 - DNA, 65 bp, Mus musculus
gcagcctgcttccagctgaagctgtcttctggaacattctcctggtgcttttacagcatgatcaa

SEQ ID NO: 27756 - DNA, 65 bp, Mus musculus
actcaggtgcagaggaagtgcaaatgaaggtgctaaatctgctcatccctcactgggagctgaaa

SEQ ID NO: 27757 - DNA, 65 bp, Mus musculus
gttctgactgatatggactggccctggtctgtcactcgctggacttgggcctctgacttggacac

SEQ ID NO: 27758 - DNA, 65 bp, Mus musculus
caggatctagctctgaaaagggaggttctgggtcaggggaaggttgtggctcaggtgtgaccttc

SEQ ID NO: 27759 - DNA, 65 bp, Mus musculus
gagtgaggtggtggatgtggccaagctcatgaaagcgtatatcagcatgattgtgaagaagcgct

SEQ ID NO: 27760 - DNA, 65 bp, Mus musculus
gagccagaattacacctaggaaagcagcagcagcaacagatagagcgtgaaggttatcaaggacc

SEQ ID NO: 27761 - DNA, 65 bp, Mus musculus
ccatagagttgagggaagccattgccctagctattgctcagaccaacaatgaactggacgctcag

SEQ ID NO: 27762 - DNA, 65 bp, Mus musculus
gaagagcaaggaactcaccacagaaatcgacagcaacattgaacaaatgtccagccataagtctg

SEQ ID NO: 27763 - DNA, 65 bp, Mus musculus
tacacttctatagtcaaggtgcttagcctcaaggttgcagatgcaccctctagtactctgggtgc

SEQ ID NO: 27764 - DNA, 65 bp, Mus musculus
gcatccacgaggtgctggtgtttgctatccagaagtcagacatggatttacggcgtacactgttt

SEQ ID NO: 27765 - DNA, 65 bp, Mus musculus
ggaagggttatgcagacattgtccagttgctactggcaaaaggtgcgaggacagacttgagaaac

SEQ ID NO: 27766 - DNA, 65 bp, Mus musculus
aagcaaactgggcagattggctggctaccagatccagctctgagatgggtgtgagtgggcgtgtc

SEQ ID NO: 27767 - DNA, 65 bp, Mus musculus
cgcatgtccttgccaggtgccctcagctcagacctaggacccttagtcatttcttcacaagtatt

SEQ ID NO: 27768 - DNA, 65 bp, Mus musculus
ggggcttaatctctagcttggaaattggcgttcgctttttacaaggtcgtgcactggggaaaagg

SEQ ID NO: 27769 - DNA, 65 bp, Mus musculus
aagagcaatgtccactgtcaggtgttttccaagtccagttccaggagcctcctcatgtttgcctg

SEQ ID NO: 27770 - DNA, 65 bp, Mus musculus
tctgtatatggatggcacagaggaatcaaggacaacttagctctctgcatacttggaacaaccaa

SEQ ID NO: 27771 - DNA, 65 bp, Mus musculus
tcctttgctttcagactagccgtcccttctcagttgtcttggaaatgaagtgaaggcagatgagg

SEQ ID NO: 27772 - DNA, 65 bp, Mus musculus
atttccattgaggaagactctatgcatcatgacggccacgtagagccctctcctggacagcccat

SEQ ID NO: 27773 - DNA, 65 bp, Mus musculus
gacaccgatgggtcaaagtggatcaaacagtacaccggagtcaacgccatctcaaagaaagagtt

SEQ ID NO: 27774 - DNA, 65 bp, Mus musculus
gaacaggcacagtccgcaaggggcttgcaggagctgcgagcacgagcagatgagttgtgcactat

SEQ ID NO: 27775 - DNA, 65 bp, Mus musculus
agttttcagacgaccacctgcacatcatagaacacatcaagaagaagtgctgctatgctgcgctg

SEQ ID NO: 27776 - DNA, 65 bp, Mus musculus
tccatggatactggtatcaatgactgtcaggttgagacttgccactacaatgttctcttcagtca

SEQ ID NO: 27777 - DNA, 65 bp, Mus musculus
aggaaggtgaggaaggcgaggaaggcgaggaaggcgaggaagactcagcctctgaagtaaccaaa

SEQ ID NO: 27778 - DNA, 65 bp, Mus musculus
gggtcaaattattatgtgaccaaaagaggaaacaactcgaagatctcaattactgtcgagaggaa

SEQ ID NO: 27779 - DNA, 65 bp, Mus musculus
ccccgcttttcatggctctgcctggacatccggcctccaggttccgagtggagagaagatgagaa

SEQ ID NO: 27780 - DNA, 65 bp, Mus musculus
atgcagaacatgagcattcatacgaagaccaccagcggctactcaggaggactgagttcatccta

SEQ ID NO: 27781 - DNA, 65 bp, Mus musculus
gagctgcaccattgagaaggcacttgctgacgctaaagcccttgttgaaaggttgagagatcatg

SEQ ID NO: 27782 - DNA, 65 bp, Mus musculus
cggagccagttcctcgcagacaaacaacgtgagctggaggaattgcaactacagcaaaggcggca

SEQ ID NO: 27783 - DNA, 65 bp, Mus musculus
tctgggctgtgtctactgtagctatggaagttgggaccttttccgggaggcttatgctgccattg

SEQ ID NO: 27784 - DNA, 65 bp, Mus musculus
tgtgcctacctgcgcaagtcagatctggaggccaacgcagaggcactgacccaggagaccgactt

SEQ ID NO: 27785 - DNA, 65 bp, Mus musculus
agatctgtcacatccactgccttgtgcctgagcatcctcaacacacataggtcagggagcacact

SEQ ID NO: 27786 - DNA, 65 bp, Mus musculus
gaaggaggcacagaaaagctcatccattgctagcttcaaggacccaaagatcagtaccagcctcc

SEQ ID NO: 27787 - DNA, 65 bp, Mus musculus
aaaccttgaaagagaagacagcagccaaaacagacaacttgaaaaccccatcagatcctgcggag

SEQ ID NO: 27788 - DNA, 65 bp, Mus musculus
atcattctgagggatggcctggaagatcccctggaagatacaggtctggtccagcaacagctgga

SEQ ID NO: 27789 - DNA, 65 bp, Mus musculus
agccctggatgcaggcaccctgtacaatcaagatcacccataagaaccagatgcctatgcttatg

SEQ ID NO: 27790 - DNA, 65 bp, Mus musculus
ccgaccagcggagaagcagtcgctactacaaccatgacctaggcagatagccaataagatggcta

SEQ ID NO: 27791 - DNA, 65 bp, Mus musculus
ttccacccataacaacctctatcccagccctgaatgaccctgcagctcatcgtgttcgctatagt

SEQ ID NO: 27792 - DNA, 65 bp, Mus musculus
aaagttgtagtgagtgcagtagataattggacattctgagggatagacaaataggtcaagtctag

SEQ ID NO: 27793 - DNA, 65 bp, Mus musculus
tagcacattttcaggaagcatcaccgggcctctgtacacacaccgacagccctcagtcacaatat

SEQ ID NO: 27794 - DNA, 65 bp, Mus musculus
gtacaacgtgctaagcctggctaagagcgaagaggtgatccttcgatggagccaagagtttagca

SEQ ID NO: 27795 - DNA, 65 bp, Mus musculus
acgccgcttgtctacaccaaatctgatgtgcaacccagataagccagatgcccctgctttccact

SEQ ID NO: 27796 - DNA, 65 bp, Mus musculus
gccaaacatgacctcctcagagtacaggagcagctgagcatggctgaaaaggagttagagaagaa

SEQ ID NO: 27797 - DNA, 65 bp, Mus musculus
gagcgctctgaggagctggatgttaacgcttttgaggacatcatggctttctatgagagcaggaa

SEQ ID NO: 27798 - DNA, 65 bp, Mus musculus
ccgttcctgatatctcctgtgcgatcttcacttcacctccagtcttcctggtgctcatcttgtta

SEQ ID NO: 27799 - DNA, 65 bp, Mus musculus
ctccacctggctatgccggcctatgtcaggcacactacaaagagtatctcgtgagcctcatcaat

SEQ ID NO: 27800 - DNA, 65 bp, Mus musculus
actctgcactggagctagcttccttgtatttgaggagcaggtctagagtaatctgcaggtcctca

SEQ ID NO: 27801 - DNA, 65 bp, Mus musculus
aagtgcacccagcaccagctgatcaggacgcgcaaacatgagtccagggagagcttcatctgtgt

SEQ ID NO: 27802 - DNA, 65 bp, Mus musculus
agggtggtcgagctgtgccacccactctatagcttcaagtctgccttccacaaggatgcttttga

SEQ ID NO: 27803 - DNA, 65 bp, Mus musculus
ccagcgttgacaggcatgtttgatttgagtgctatccatggctgagaaagagcagtagaaagcca

SEQ ID NO: 27804 - DNA, 65 bp, Mus musculus
acggctgaattctcggtgatgaaggcttcagtggacccctcctgactcctgatgcttcgcttagt

SEQ ID NO: 27805 - DNA, 65 bp, Mus musculus
tactatttcgcactcccttcgcactacgttgacctgcgtgaggatttgtagaacctcagcctcct

SEQ ID NO: 27806 - DNA, 65 bp, Mus musculus
aatgaggggaacagtgccctccacattatcgtccagtacaacaggcccatcagtgattttctgac

SEQ ID NO: 27807 - DNA, 65 bp, Mus musculus
ccatatcagtgtggaggaatcagtggatggaaaagtggtttcttcccgtaagagagaaatctaag

SEQ ID NO: 27808 - DNA, 65 bp, Mus musculus
aggggtccaaggtgcagcagcaagtggtcagggaggatatgaatccatatttacagcaaagcacc

SEQ ID NO: 27809 - DNA, 65 bp, Mus musculus
aggagtcaaacgagtaccggagacaggtgcagtcactcacctgtgaagtggatgcccttaaaggc

SEQ ID NO: 27810 - DNA, 65 bp, Mus musculus
cagccaactattccagccctttgtacgactatgtccaagaacaggcagcctatcagtactaggct

SEQ ID NO: 27811 - DNA, 65 bp, Mus musculus
atgagacttaaaaccctggcttctcccaccttgagtcctgaaggtcaagaaatgggcaagctccg

SEQ ID NO: 27812 - DNA, 65 bp, Mus musculus
aatttcagttaacaggctttctaagctgaacacttcgccactatcatagctgtttgactcctagg

SEQ ID NO: 27813 - DNA, 65 bp, Mus musculus
agcacatcaagttggactgtgagcggtgccaagccaaggggttcgtctgtgaactctgcaaagaa

SEQ ID NO: 27814 - DNA, 65 bp, Mus musculus
gtggtatattgctaacaaaagccagtaccacagagcagaggcccaaaggtcccaatctgaacgct

SEQ ID NO: 27815 - DNA, 65 bp, Mus musculus
tggggagcgtcggacaagaagagaatcacgccaggagagcgacccagaagacgatgatgttaaaa

SEQ ID NO: 27816 - DNA, 65 bp, Mus musculus
ttcctatccagaccttctctgctctcaacttccgagaaaccagccccgagcaaaggggttctgaa

SEQ ID NO: 27817 - DNA, 65 bp, Mus musculus
tggccactgaaccacgccagggtgtactctccactgaagtccactttcaattgcttccatgcaat

SEQ ID NO: 27818 - DNA, 65 bp, Mus musculus
aggactatggctcagcactccgaggcctgtgtgaagatgccctagagggcctactgttcctgatg

SEQ ID NO: 27819 - DNA, 65 bp, Mus musculus
atgatgatttaagcactgactctgagcagatcatggacttcacgccagccgcaaacaaacagaat

SEQ ID NO: 27820 - DNA, 65 bp, Mus musculus
tttgaactcacgagtgacctcagcatccttcagatgactaggaaagagctggagaagcaagtggg

SEQ ID NO: 27821 - DNA, 65 bp, Mus musculus
ggaaatggaaaacttgaagcattaaagccagccattctgttttgctccaaaaaaacaacaaaaag

SEQ ID NO: 27822 - DNA, 65 bp, Mus musculus
ggctggtgacacagttcaacccctcagacttttagtcctcgaattcggcctgagaattaaaagag

SEQ ID NO: 27823 - DNA, 65 bp, Mus musculus
tgcacacctctccttgccaaatagtccgtgccttgccttggagggtttgcccttcttagcccatt

SEQ ID NO: 27824 - DNA, 65 bp, Mus musculus
actgtcaacagccagctcaagaagttacagtccatggagtctcaggtggaggagtggtgccgaga

SEQ ID NO: 27825 - DNA, 65 bp, Mus musculus
gcctgtttaggagatgacacagagggagggtaaggggatgctatagtctgtgtgtgacttatggt

SEQ ID NO: 27826 - DNA, 65 bp, Mus musculus
gcgagacccagagtcttttcaaggatgatgtcagcacttttcctttgatcgctgccagaccgttc

SEQ ID NO: 27827 - DNA, 65 bp, Mus musculus
aggaaataacccgttctctggaagacactgaaacaggagagcaggacttccgtccactgggcagg

SEQ ID NO: 27828 - DNA, 65 bp, Mus musculus
ataagcaagaacctgtggggatgtagcctcaagaatagacggaaggaagcaaggtcgtggatggg

SEQ ID NO: 27829 - DNA, 65 bp, Mus musculus
gagccttcaaggcttcagaccagcgagagatgacgccagagcgcctcttccagcacctccatgaa

SEQ ID NO: 27830 - DNA, 65 bp, Mus musculus
gccgttcagggccaaatggatgaagatgtccagaaggtcttgaagcagatcctcaccatgtgtaa

SEQ ID NO: 27831 - DNA, 65 bp, Mus musculus
aaagaactgtggcttcccgggcatcaccagtgagcagtgctttgatcttggatgctgctttgact

SEQ ID NO: 27832 - DNA, 65 bp, Mus musculus
aaagactgcctacgagctgctggactcgaagctgttggctaagagcaccgtgcagcctttcaatt

SEQ ID NO: 27833 - DNA, 65 bp, Mus musculus
ctcagcagccagctagaactggtctgggagtagaaagccatcctcatgtattcactccttatctg

SEQ ID NO: 27834 - DNA, 65 bp, Mus musculus
cagggacttggaacctttaggaacaatcagtgcatccggtgacagcctgggttctttagaggctg

SEQ ID NO: 27835 - DNA, 65 bp, Mus musculus
gagaccgagtcgctgagaagagtgccagcattttcacaagaacttgctgtttgttagcagtgctg

SEQ ID NO: 27836 - DNA, 65 bp, Mus musculus
aaccgcagagcagaggaccaggagctagagagcctgtcagccatcgaggcagagctggagaaggt

SEQ ID NO: 27837 - DNA, 65 bp, Mus musculus
aggacaagcacgtggaagaggtgcggaagaacaaagaatccaaagaccccgcggacgagactgaa

SEQ ID NO: 27838 - DNA, 65 bp, Mus musculus
aaagcggcagagagagtgggaatgggagaaggcacgcgtaggtgcgcgggaaggaagaacccctt

SEQ ID NO: 27839 - DNA, 65 bp, Mus musculus
tctccatctgggcttcctcgtctgctgagcttttgtcccagctcctgtgtacaacacaagctaga

SEQ ID NO: 27840 - DNA, 65 bp, Mus musculus
gtcctatgccaggtgtacttgcagtccctcaagaatctagaggagaaaactgagagccaaaggat

SEQ ID NO: 27841 - DNA, 65 bp, Mus musculus
attggaacaaagatgatcgagagggtcgattcgtccttaagaacgagaatgacgccattcctgcc

SEQ ID NO: 27842 - DNA, 65 bp, Mus musculus
tgggtgtggccatcttgatctacctgctgttctacagaaagggctttggggaccagaataacaga

SEQ ID NO: 27843 - DNA, 65 bp, Mus musculus
cctttctgagcgagactgttcaaccaaaagaacaactaaagctatcatcttttcaaggggagcag

SEQ ID NO: 27844 - DNA, 65 bp, Mus musculus; identical to SEQ ID NO: 23716

SEQ ID NO: 27845 - DNA, 65 bp, Mus musculus
cacgtctatacaccatttgcacagaatctttcgcgatagcacgtaaagacaccaatgcttctctg

SEQ ID NO: 27846 - DNA, 65 bp, Mus musculus
tgccagttgctttctaagcccaacggataggaagcctctgttctccaggcaaggattagtgggca

SEQ ID NO: 27847 - DNA, 65 bp, Mus musculus
gaacccctacgagcagcttcccatctatggaccagagttcattgccaaataccgggactatactt

SEQ ID NO: 27848 - DNA, 65 bp, Mus musculus
ccactggaggagctcatttgcgtaggtttgtggttcataggattttgcttgcttctagaacagcc

SEQ ID NO: 27849 - DNA, 65 bp, Mus musculus
tcaacaaccctcccctggaaatgatgtttgatgtggggaaagcgcaaccaccgctgatgaaaagg

SEQ ID NO: 27850 - DNA, 65 bp, Mus musculus
tcgcagagaggaactggctccttaccccaagaacaagaaagcgacgagccgcaaagatgaagaat

SEQ ID NO: 27851 - DNA, 65 bp, Mus musculus
gcatcaccataccctgaactatcgtgaagaatgttatggagtgctttgtgctgacccaaaccaag

SEQ ID NO: 27852 - DNA, 65 bp, Mus musculus
tgcagatagtgccaccctcaacgtgggctatgtgggaaccattgtccctgcctcagggtcattgt

SEQ ID NO: 27853 - DNA, 65 bp, Mus musculus
tgtcagaagctcccatacctgctcccacactttgcaagtgacaggtgtcaagttgaaagacctgg

SEQ ID NO: 27854 - DNA, 65 bp, Mus musculus
aatccagtacctcaagcaagttcagcagccgagtgtggcccaactgagatcaacaatggtagacc

SEQ ID NO: 27855 - DNA, 65 bp, Mus musculus
ccacggaatgcaagcctgctgttaagagtaccttatatcccttctacaacctgcactccagctgg

SEQ ID NO: 27856 - DNA, 65 bp, Mus musculus
cagccactcttcctgccagcacacaaacctagcccatgtcctcctgaagattctcctaattcctt

SEQ ID NO: 27857 - DNA, 65 bp, Mus musculus
agagacactgcagtctggactggtgggtctatcctggcctcactccagggctttcaaccactgtg

SEQ ID NO: 27858 - DNA, 65 bp, Mus musculus
cctcgagtccttgcctggtatctcgaaggatgggtccattgagccatggcaaattaagttacaga

SEQ ID NO: 27859 - DNA, 65 bp, Mus musculus
tgtggcttgagcaaggactggatcggggacatttggaaccttacgttgtgggagtctctgggctg

SEQ ID NO: 27860 - DNA, 65 bp, Mus musculus
acctgggtggctgcttccgctgagaccttgccgtgggagaacacagcgacagcagtatggaaacg

SEQ ID NO: 27861 - DNA, 65 bp, Mus musculus
cacactgtttgtgtgccttgttcaccctgcctacagacccgctactgaagcctctgagcatctct

SEQ ID NO: 27862 - DNA, 65 bp, Mus musculus
tccccgatctgctccctgctgcaggccaataaaggagccaggagtcctgaagaataaagacctca

SEQ ID NO: 27863 - DNA, 65 bp, Mus musculus
agatacacgatctccagtacaaaatattctgggaaaatttgaaggtgacattaacaagaggcttc

SEQ ID NO: 27864 - DNA, 65 bp, Mus musculus
aagtcattgagatcctcatagaagactcatctggctggtggaagggtcggcttcatggccaggaa

SEQ ID NO: 27865 - DNA, 65 bp, Mus musculus
gatggagacgagggctcttgtgttaaggcaaaaggccaaggaagacccggaaatcagacaaaaga

SEQ ID NO: 27866 - DNA, 65 bp, Mus musculus
cccattagctctgcctttccatcaaggccaaacatggctggcaagaccaagatcaatcccaccag

SEQ ID NO: 27867 - DNA, 65 bp, Mus musculus
actgcctaactgcactgagaaccacttctaactacagcccttggctcttggactgggcattggaa

SEQ ID NO: 27868 - DNA, 65 bp, Mus musculus
tgtcactggcacctttgacttggagctgaacccactgatgtctgtcccactgatcactatgatgc

SEQ ID NO: 27869 - DNA, 65 bp, Mus musculus
aatgttactgttgaaaggccctaggcaagcctgccctgttggttgtagtcgtgagtggtcttggg

SEQ ID NO: 27870 - DNA, 65 bp, Mus musculus
gcaactgagactggaatcttgaaggcagctgtgtctgggaacgagccttattccgtttcttgatg

SEQ ID NO: 27871 - DNA, 65 bp, Mus musculus
gccagcagcaaggctgagcgagcagaatggattgaagctatcaagaagctaacatgatctaaagg

SEQ ID NO: 27872 - DNA, 65 bp, Mus musculus
ttggggaaaatttgccctcaacttctgcatagaactacaggggagcagcttgctcacggtgctgg

SEQ ID NO: 27873 - DNA, 65 bp, Mus musculus
gagcagtttggccctgatgagctgcggaaggtgctagtgacgctggcagcacagagccggcggtc

SEQ ID NO: 27874 - DNA, 65 bp, Mus musculus
caacatgggacgcaccagcacagagcactcttcccacctagtttggaagcgtggtgaaacaatct

SEQ ID NO: 27875 - DNA, 65 bp, Mus musculus
cacataagggttcgtttcacctggttatagaagcacgctttcagaagcagtgctacaagtctacg

SEQ ID NO: 27876 - DNA, 65 bp, Mus musculus
aagaagaagctgacaggaatcaagcatgaattacaagctaactgctacgaggaggtcaaggaccg

SEQ ID NO: 27877 - DNA, 65 bp, Mus musculus
aacagccagtcctacgaggagatggtggggaacagcctgggaccgggatctgcaatctctgagat

SEQ ID NO: 27878 - DNA, 65 bp, Mus musculus
ctgccaaaatgtacctggagacagacccttctggaagagacaagaggacaccgattgtcatcatc

SEQ ID NO: 27879 - DNA, 65 bp, Mus musculus
aggcctcaagtaccgggaaggtggtgtagagtcggcatttcacaagacaacctcgggcgccaccc

SEQ ID NO: 27880 - DNA, 65 bp, Mus musculus
acagatggcaaaactggacttgattctactggcatgtaagacaggcgtgctagtgagcagtcgtg

SEQ ID NO: 27881 - DNA, 65 bp, Mus musculus
gtgaaaaggacggttcccaggcagcatctgtcagtatgtcagagtgctagtgcttccttctaaac

SEQ ID NO: 27882 - DNA, 65 bp, Mus musculus
tcggctcagaaagctggaggtagaggccaacaatgccttcgaccaataccgagacctgtattttg

SEQ ID NO: 27883 - DNA, 65 bp, Mus musculus
ggtcagtcagtaatgggcactctagttaaggtggttgatggacttagccatgtatgctgctaaag

SEQ ID NO: 27884 - DNA, 65 bp, Mus musculus
ggccaggaacatggggagtgtgtgctactgaccacatgagaagttagtattgccaagctttcaca

SEQ ID NO: 27885 - DNA, 65 bp, Mus musculus
tgtggctttctctacccatcagtcgtcgtctcgcaggaatagtaaaggcattaaggatgcggcaa

SEQ ID NO: 27886 - DNA, 65 bp, Mus musculus
gactctttgcctgctccaacaggatcggacgctttgtgatcgaagaggttcctggcgagcttatg

SEQ ID NO: 27887 - DNA, 65 bp, Mus musculus
gcactttgattgactggcaacggatcctctctgacttgaatctggtgatgtaccccaagttaggg

SEQ ID NO: 27888 - DNA, 65 bp, Mus musculus
cagacgacctcaccgagacctggcttaaggaaaagttagctttctttcgttgacctttgagccag

SEQ ID NO: 27889 - DNA, 65 bp, Mus musculus
atggctgtgctaaaggcagttcgggaaaatgctactctcactgagctccgtgtagataaccagcg

SEQ ID NO: 27890 - DNA, 65 bp, Mus musculus
taattcctcagaggctggcagaaaaccctgggaacggagcaactcggtggagaaacctgtgtcct

SEQ ID NO: 27891 - DNA, 65 bp, Mus musculus
ggattgccagacattcaaagccagtctgaactacataggaacctccaggttagcctgggctacat

SEQ ID NO: 27892 - DNA, 65 bp, Mus musculus
tcaatgtgagtccaaggtgaacactcctaccagtgtggagctttaagctgactgagcgcaaccct

SEQ ID NO: 27893 - DNA, 65 bp, Mus musculus
tatggcagattccagaaaatgggctgacctcccctctgacagagccagtagtggtgctcgagggg

SEQ ID NO: 27894 - DNA, 65 bp, Mus musculus
aacggcactgcagcagttgggggctttgacacagagcctgatgagttctcagacttcgaccgact

SEQ ID NO: 27895 - DNA, 65 bp, Mus musculus
cccaagaagcccacagacacggccagtgtgcaaaacgaagccaagttggatgagattctgaaaga

SEQ ID NO: 27896 - DNA, 65 bp, Mus musculus
gcagctccagacgagggctcaccaaaccgtccaaaatcccaaccatgtctaagaagaccaccact

SEQ ID NO: 27897 - DNA, 65 bp, Mus musculus
aggactacgagcagaagaccaagagggcggagaaagagctctccgagcagattgagaaggccctc

SEQ ID NO: 27898 - DNA, 65 bp, Mus musculus
ggccttaccactcagacctggacgtataagtgctcacttttccaacacatcacagcgatagtcct

SEQ ID NO: 27899 - DNA, 65 bp, Mus musculus
gtttgcatagcctccacctgacccgctaagtcaccctccaaagctcacatgagtcctcattttag

SEQ ID NO: 27900 - DNA, 65 bp, Mus musculus
atatccttttctcctggttgttactaacagcaagttcaatgtcggcagaagacctggaagcccag

SEQ ID NO: 27901 - DNA, 65 bp, Mus musculus
gaaaaggcagaagatgcatattgaagctgccaagatgctgtctttcagcgaggaggagtttatga

SEQ ID NO: 27902 - DNA, 65 bp, Mus musculus
ctgtaatctgggtcacctcagacttgtcatcaagcctctggaagaccccgttcacacatttagga

SEQ ID NO: 27903 - DNA, 65 bp, Mus musculus
gctgacaccttcccttgtagactcttcttggaatgagaagtaccgattctgctgaagacctcgcg

SEQ ID NO: 27904 - DNA, 65 bp, Mus musculus
ttgatccagagtccttgtttccttgacttgctccaccagccctgcaccagctttccaaatgcact

SEQ ID NO: 27905 - DNA, 65 bp, Mus musculus
ccaccgtggaaggacacagcaagaagatacaaagaccagaaaccaggcctttccagatactggat

SEQ ID NO: 27906 - DNA, 65 bp, Mus musculus
gagaaaatccagcgagccagtaggaaggatagacacagacttaaaggcgtgcacagagcaagatg

SEQ ID NO: 27907 - DNA, 65 bp, Mus musculus
tcatgtccatatttgccatgtgtctgtccagatgtgggctggtggaggtgggtcacctgggacct

SEQ ID NO: 27908 - DNA, 65 bp, Mus musculus
agacagatgctagaaagtcagcagcaaccactagtctacctcccaccatgcttccaagcagccga

SEQ ID NO: 27909 - DNA, 65 bp, Mus musculus
gaggacatggagttctaggaagagtctgcaagccgagagtgagctggagctgtttgtccattatt

SEQ ID NO: 27910 - DNA, 65 bp, Mus musculus
accacacttttctctacgagaagctctacactggcaagccaaaccttgtgaatggcctccaagcc

SEQ ID NO: 27911 - DNA, 65 bp, Mus musculus
gctgccttccacagataaagcaggggtgggtctcatgtgaagagcctgtagcagtgaaggttgct

SEQ ID NO: 27912 - DNA, 65 bp, Mus musculus
gacaaaggaggtccatgtcctgcttgctggagacagctggccagaatcgtatatgctggttttat

SEQ ID NO: 27913 - DNA, 65 bp, Mus musculus
ctgaacccagacctgatgaagaacaacccttgggtagagaaggccaagtgcaccatcctatgagc

SEQ ID NO: 27914 - DNA, 65 bp, Mus musculus
ctccgggacaaagagcggcagatgattaaggaacgtttcaaggggttcaatgatggactcgaaga

SEQ ID NO: 27915 - DNA, 65 bp, Mus musculus
gcttcacccagaagccagtgactcactccttgattggtggaagctcagttggctcctgagagtga

SEQ ID NO: 27916 - DNA, 65 bp, Mus musculus
tttgattgggatggatatggaactcacaatgggtacagcagtagccggaagataactgaagcagc

SEQ ID NO: 27917 - DNA, 65 bp, Mus musculus
ctcccatagctgatctgattgatcaccccagactcagggcaaaagtactgggtcgagatatcagt

SEQ ID NO: 27918 - DNA, 65 bp, Mus musculus
actctcggagacacaaagggcaacagcagccacagccagggacaacagggccactcacatcagta

SEQ ID NO: 27919 - DNA, 65 bp, Mus musculus
ttctagtctcttgagaagcgcctacatccagagtcgtgtggacaccataccctatctcttctgcc

SEQ ID NO: 27920 - DNA, 65 bp, Mus musculus
cccctgtggacagtgatggggagagtgacaattctgaccgtgttcctgtgcccagtttccaaaat

SEQ ID NO: 27921 - DNA, 65 bp, Mus musculus
tcagaccacagccctgatggcccatctctttgaaatgggattctgcgacaggcagctgaacctaa

SEQ ID NO: 27922 - DNA, 65 bp, Mus musculus
gtgcacatctggaagctgaacagaaacccagaaagtggctctattgaggtggaacactgccatgg

SEQ ID NO: 27923 - DNA, 65 bp, Mus musculus
gctttccgaggcctgagtgttgcatcacatgcagtaggacatcatgttagcaactcaaagaaaca

SEQ ID NO: 27924 - DNA, 65 bp, Mus musculus
ggcacagatgtgtgtgtccttgggattgagaatcttatcagtgtcaaagatgtctccatccccag

SEQ ID NO: 27925 - DNA, 65 bp, Mus musculus
agatgccggagttcctagaggacccttcggtcctgaccaaagacaagttgaagagcgagttggtc

SEQ ID NO: 27926 - DNA, 65 bp, Mus musculus
ctgactaggattgctttcaagtactattctgtagtgcagataagtggcttggttgagcacaattc

SEQ ID NO: 27927 - DNA, 65 bp, Mus musculus
tgtacagagacagacagaagtactgtaaagagtggaggaagcggaagaggatgaccacagagctg

SEQ ID NO: 27928 - DNA, 65 bp, Mus musculus
gccacgtcctacacggaagatgatttctactgccctgtctgtcaggaggtgctcaagacgccggt

SEQ ID NO: 27929 - DNA, 65 bp, Mus musculus
agagggtcaagtcataaggttgcattgggactgggcacaactcctaatgctgtcagctaaaagaa

SEQ ID NO: 27930 - DNA, 65 bp, Mus musculus
aaagtctggactcagccacaaactactacagcctgtccacctgaaatcttgacttacccagtccc

SEQ ID NO: 27931 - DNA, 65 bp, Mus musculus
tggtgcgcttccagctgcccaacgtgctgttcgcctacgctcatactctcgccctgtatcatgga

SEQ ID NO: 27932 - DNA, 65 bp, Mus musculus
gctccaacgaagaggacgaaaccacaagtacactcagtgtggagaagttagtgatctaggctagg

SEQ ID NO: 27933 - DNA, 65 bp, Mus musculus
gccgtcccttccacatactcctgataccatgatgttttgcacaaagccatgacaccaagaagcta

SEQ ID NO: 27934 - DNA, 65 bp, Mus musculus
aatagagacctcatcctggatgctgagaacactgttggatgtcacaagatgctaaaaggctcagc

SEQ ID NO: 27935 - DNA, 65 bp, Mus musculus
agttcccacctcctctaacttcccaagaacacttggaacaaactctgagccacggagacttggag

SEQ ID NO: 27936 - DNA, 65 bp, Mus musculus
agggttacagggaaacctacagtcagaagcagctgtgtctttggtctttgagatcttagcctccg

SEQ ID NO: 27937 - DNA, 65 bp, Mus musculus
catccttccaagatctcatgactgacaaaactccattgggccaaatctgcctgaagatcattacc

SEQ ID NO: 27938 - DNA, 65 bp, Mus musculus
cttggacctcctgtctcagttgaatgaacggcaagaaaggatcatgaacgaagccaagaaacttg

SEQ ID NO: 27939 - DNA, 65 bp, Mus musculus
atctgcatactcttcctgattggcctgatgtgtggacggatcaccaagagagtgacacgagagct

SEQ ID NO: 27940 - DNA, 65 bp, Mus musculus; identical to SEQ ID NO: 23716

SEQ ID NO: 27941 - DNA, 65 bp, Mus musculus
tctggatttcttgcagaaattatgtggctaaaagtttgcaggcagatcttgctgacatcaccaag

SEQ ID NO: 27942 - DNA, 65 bp, Mus musculus
ggatccagtggcttcagatctctgaattacggagtctttagctttcctaccagatatcacagatc

SEQ ID NO: 27943 - DNA, 65 bp, Mus musculus
tgtgatcttcatagctctaggccatctcctggggctgctggacctcagccttcgctggcagtggg

SEQ ID NO: 27944 - DNA, 65 bp, Mus musculus
gtgtgagtgccagagagaaaactgtgatgactgaagaaagtaagaacatccaagactacatgaac

SEQ ID NO: 27945 - DNA, 65 bp, Mus musculus
gggcggttgcattgcccgtctacctccttatcacagttgtaattggttatgtgctcttatttgga

SEQ ID NO: 27946 - DNA, 65 bp, Mus musculus
tttcgggctgtagctgaccaggtgtatggagaccaggacatgcatgaggttgttcgaaagcattg

SEQ ID NO: 27947 - DNA, 65 bp, Mus musculus
gagtttgctgcagatttacctgtgagcttctcactcccaacccttgttaggcttgtgttgtctac

SEQ ID NO: 27948 - DNA, 65 bp, Mus musculus
ttggttactgctgtttccctacacctgcacatctgtacacctgagggcttaaatgcctgatggtg

SEQ ID NO: 27949 - DNA, 65 bp, Mus musculus
tctgacatcctgaactcagtgagaaggggctgtggaaccccagaagccgagggacccctatcagt

SEQ ID NO: 27950 - DNA, 65 bp, Mus musculus
gacctcagcacaagtaccttccctgaaccccagctactgcagagtatccaaaggaatatccggga

SEQ ID NO: 27951 - DNA, 65 bp, Mus musculus
agacagagaggctgctgggagaggcttcctccaactggagccaggcaaagagagtgctgcaggaa

SEQ ID NO: 27952 - DNA, 65 bp, Mus musculus
aggcgctcaaggtccaggtcccgaagcccccattacagacattaggcagaaaacggagttggggc

SEQ ID NO: 27953 - DNA, 65 bp, Mus musculus
ggccatctgcatagcggtacaaggaccagctcttgaaagagacagtgctccagccactgctgcag

SEQ ID NO: 27954 - DNA, 65 bp, Mus musculus
ctgcagccccgaatctactgtccgtttgctgggtactttgtggagtctcacccatctgacaagta

SEQ ID NO: 27955 - DNA, 65 bp, Mus musculus
agcctgggctctaaggaattgctttcctgtgggacaaggagggcaggtggctgaccatatctgag

SEQ ID NO: 27956 - DNA, 65 bp, Mus musculus
tatatatgaggtctcgtgtacagttaaagctcgcgtcctgtgatttcctgtatggataccctggg

SEQ ID NO: 27957 - DNA, 65 bp, Mus musculus
ggaacttgctttcctactcgatttccatgatggcctgagatccctgagatagcaacagaggctgt

SEQ ID NO: 27958 - DNA, 65 bp, Mus musculus
attcacccaagggaggagactttactgtggaagtagattccccagtatctgttaccaaaggccct

SEQ ID NO: 27959 - DNA, 65 bp, Mus musculus
tcctgtcctcaggagatggcagctgtaaaggaatttctggagaaacttctgcctccggtctaact

SEQ ID NO: 27960 - DNA, 65 bp, Mus musculus
atctggcgagtgtgctgaccccagagatcatggctcccatccttgccaatgcagacgttcaggag

SEQ ID NO: 27961 - DNA, 65 bp, Mus musculus; identical to SEQ ID NO: 883

SEQ ID NO: 27962 - DNA, 65 bp, Mus musculus
atgagtggatgtgcacccactttgaagaacacccactgtttgagcgtgtgcctcttgaagagcta

SEQ ID NO: 27963 - DNA, 65 bp, Mus musculus
ccaaagaggcttcagaggacagcatgatcctacaagaccactatctccttcaaatccttcttctc

SEQ ID NO: 27964 - DNA, 65 bp, Mus musculus
caaccagtgttgtggagactccaaaactctgtaccttgatactgcgtcatctccctgtgtgccta

SEQ ID NO: 27965 - DNA, 65 bp, Mus musculus
tatgcaagaaggagattcagagagagacaggcccaggaggctgaatgagcccaaaggaacaggat

SEQ ID NO: 27966 - DNA, 65 bp, Mus musculus
gtgtctgagtgtgtgttcattcacatcctaaatgagtagtttgggtttctttccctcacagtccc

SEQ ID NO: 27967 - DNA, 65 bp, Mus musculus
ctgcttggcctctctctactcgcagtgaccattctgctttgctgtaacatggctcgacctgaaat

SEQ ID NO: 27968 - DNA, 65 bp, Mus musculus
ccttaaatctccaactcctcctccatcgtgtaagccaagcctttctcggaagtcttctgtggacc

SEQ ID NO: 27969 - DNA, 65 bp, Mus musculus
ttaattcctgagaccctgcagtgtcccttacccctggtcttccataatgacgctgcgattcccct

SEQ ID NO: 27970 - DNA, 65 bp, Mus musculus
tgcagggtttggccttcaccaaccgtcgactgtccaccactgtcctacgtgccttctctaagcca

SEQ ID NO: 27971 - DNA, 65 bp, Mus musculus
attcagaaagcaattagtgctgcagagaatgctatcctggaggtggctgtgatcgggcagtctgg

SEQ ID NO: 27972 - DNA, 65 bp, Mus musculus
ccgtagttgagtttagactttccaggttttcttagcctcgatccgtggagaaacttgcctgtttt

SEQ ID NO: 27973 - DNA, 65 bp, Mus musculus
ttgagacctcgcatcgaagatggctcaggcaccaacagttatcgtgactcaacctggattcgttc

SEQ ID NO: 27974 - DNA, 65 bp, Mus musculus
ggagatacacgaaagaagatcaacaacaaattgtgtgagcagaagtttgatatggatatacagaa

SEQ ID NO: 27975 - DNA, 65 bp, Mus musculus
ttagagaactacaaggcctgcagaatttcccagagccatctccccattgactgcatcttcccagc

SEQ ID NO: 27976 - DNA, 65 bp, Mus musculus
attctaatgcgtgtgcttcgaaatgacctggctcggtacaacctagacgaagagacgagctctgg

SEQ ID NO: 27977 - DNA, 65 bp, Mus musculus
gttacgtgtttgtatctacaataaataacatgtgggtttagacaaaacacggtattgaatattgg

SEQ ID NO: 27978 - DNA, 65 bp, Mus musculus
cagttgctagtctctttaggggctccgttgactaaggcgcttttggggaactgggggtctatgaa

SEQ ID NO: 27979 - DNA, 65 bp, Mus musculus
gtcccttgctaccttgaagaaagctgtgtctatcacagggtacaatatgacccataacacctggc

SEQ ID NO: 27980 - DNA, 65 bp, Mus musculus
acaggcctactagagcgctgttccctgtcccagcagaagttctgttgtcgaaagctgcaggaaaa

SEQ ID NO: 27981 - DNA, 65 bp, Mus musculus
gcatggcaccgaacactgtagagatgcacagtcagttgaacttagtagcaacgctggctttgtgt

SEQ ID NO: 27982 - DNA, 65 bp, Mus musculus
gtgaaggcgaggacgaggtccagtttttgcggacggatgatgaagtggtcctgcagtgcagcgcc

SEQ ID NO: 27983 - DNA, 65 bp, Mus musculus
gcgtcgtgagccggaatggagaatccagtgaactagacttacagggcatccgaattgactcagat

SEQ ID NO: 27984 - DNA, 65 bp, Mus musculus
ttccattgatcctaggttcttactgactgctttctccagctgttcacagcagatgcttggatttt

SEQ ID NO: 27985 - DNA, 65 bp, Mus musculus
ccacagtttctccctgctctcctcaggagttagtggggttggatttgtcagaggtgatgagttaa

SEQ ID NO: 27986 - DNA, 65 bp, Mus musculus
tttaccttcaggccgcgagatctccaggtccttctctggacgtttagccacgtagtgcggcgact

SEQ ID NO: 27987 - DNA, 65 bp, Mus musculus
ttcgtcaagcattaaccaactgtgatgacatcttaatcaagcagaaccagaccctggctgagctg

SEQ ID NO: 27988 - DNA, 65 bp, Mus musculus
tgcaggaaccagaccccagaccaagtggtttcccaagtcgccaccctgcccccaataccagactt

SEQ ID NO: 27989 - DNA, 65 bp, Mus musculus
tatccaagcaggtggagtgcacagggaagtgttactgcacacaacgcagcgatgtaccaagagtt

SEQ ID NO: 27990 - DNA, 65 bp, Mus musculus
gtacgtggaacctccgtttgatgactcaattgctgatgtaggcaaagaatggaaaagtgccctgg

SEQ ID NO: 27991 - DNA, 65 bp, Mus musculus
tctccatctccaagagcagactgccgcttcacacctccataaacctctagctgatctgaggctta

SEQ ID NO: 27992 - DNA, 65 bp, Mus musculus
acagttactgacttatgaatgattgattttgacagagaccccaagctgcccatttcacttatggg

SEQ ID NO: 27993 - DNA, 65 bp, Mus musculus
gcaggcacctgatgcttctgtgctgtttccattctgtgatcatgtcttctccatgttgtacctct

SEQ ID NO: 27994 - DNA, 65 bp, Mus musculus
tttaaaaagtcagccgaaggacaattagacagcccagcaaagactgcagaatgcactgaccccct

SEQ ID NO: 27995 - DNA, 65 bp, Mus musculus
tgggaggcgagcgggcgaagagagcggccacgatgagggaatgcatatcggtccatgtgggtcaa

SEQ ID NO: 27996 - DNA, 65 bp, Mus musculus
ccacctgtgctacgggttgatgaccggcagcggctagccagagaacgccgagaggaacgagaaaa

SEQ ID NO: 27997 - DNA, 65 bp, Mus musculus
taaagtcctcgagggtcgactcaaacagaccgaaatcaccagtgcaacccagaaccaactcttat

SEQ ID NO: 27998 - DNA, 65 bp, Mus musculus
ctggatttcctgatgaagatcttgcccaattaccaccacctgaagaagacgatgaaaggcagctc

SEQ ID NO: 27999 - DNA, 65 bp, Mus musculus
tctgccctgtgtggctcctgctgggactctaggttgctgtgctttgactttcctgaacaatacca

SEQ ID NO: 28000 - DNA, 65 bp, Mus musculus
tagcgagaagaagcgatgggagcaggaaaagtgatggcccagacattgctatgatgttgaccctg

SEQ ID NO: 28001 - DNA, 65 bp, Mus musculus
acctttcccacgtgtacctcgcctatacagaggagagtctgcgtcagtctctgatgaagttagaa

SEQ ID NO: 28002 - DNA, 65 bp, Mus musculus
tgagttccaggtgcagagcgtggatgacatcaacaaggtgtttgagtttggctacaacaaccgca

SEQ ID NO: 28003 - DNA, 65 bp, Mus musculus
gcctggtggatcagtgtcgccatcgcctgctcatggaatttgacatctggtacaatgagtctttt

SEQ ID NO: 28004 - DNA, 65 bp, Mus musculus
agaatggcagagccaatgaaaggctacatgagacccaccaagtctcgaggactcactccagatct

SEQ ID NO: 28005 - DNA, 65 bp, Mus musculus
agtgagatgtggctccttcatgttctcatcactgttccctgaagctgtcaggtctcggtccacag

SEQ ID NO: 28006 - DNA, 65 bp, Mus musculus
gatgtcagtagcaggtcccacgccatcttcaccatcaagttcactcaggcaaaattcgacgctga

SEQ ID NO: 28007 - DNA, 65 bp, Mus musculus
gaagaaccgtgcggttggctacaccctgatgaataaggactcctcccgttcccactccatcttta

SEQ ID NO: 28008 - DNA, 65 bp, Mus musculus
ctacgtccaaggtctgtctcagcatgttgttaccaactatcatcaggttatccagctcctggagg

SEQ ID NO: 28009 - DNA, 65 bp, Mus musculus
ttctgatctcacagaagaagtggtttatacagcagaaatggctttgaaatggctcgcaacaggag

SEQ ID NO: 28010 - DNA, 65 bp, Mus musculus
aggcttctatgtggaacagcttcgggtggtggagtttggcagtctggaggctttgatggagctcc

SEQ ID NO: 28011 - DNA, 65 bp, Mus musculus
tgatgtgaagtctgggacatctggagagaaagtgggcaagctgagcttagtcgatttagccggca

SEQ ID NO: 28012 - DNA, 65 bp, Mus musculus
cgagggagcaccctgtttctggaccgtatgttgaaggcctgtcaatgaatgttgtgagttcttac

SEQ ID NO: 28013 - DNA, 65 bp, Mus musculus
gctggaggaacagacgtgtagcatcaacatctatgaacagagagtcttctagatcccatgcagtc

SEQ ID NO: 28014 - DNA, 65 bp, Mus musculus
gaagctctgaacctgctcttcttgggggacaccaacaggatgatcgctgagactcctatgaatca

SEQ ID NO: 28015 - DNA, 65 bp, Mus musculus
ttcgggaagatgatcggggaaatgttgtgctctgtggggtgaaagaagtggatgtagaaggcctg

SEQ ID NO: 28016 - DNA, 65 bp, Mus musculus
gttgtctgacaatgaggacgatgattcagcggcaaacgactccaagaagcagattcgcattttcg

SEQ ID NO: 28017 - DNA, 65 bp, Mus musculus
gcccgtacgtgcaagacctgtctaaactggctgtgacttcctatgcagacattgccgacctcatg

SEQ ID NO: 28018 - DNA, 65 bp, Mus musculus
agctcggtccagcccggttctcgggagaatgaagttcgtgtacaaagaggagcatccgttcgaga

SEQ ID NO: 28019 - DNA, 65 bp, Mus musculus
ctcaaccctgtcaaggacagtaaggagatgcagttcctcatgcagaagtgggcaggcaatagtaa

SEQ ID NO: 28020 - DNA, 65 bp, Mus musculus
cgctgtccagtgtggagaactttactgctaggatttccaattgttaggaacgtcgttagcgcgcg

SEQ ID NO: 28021 - DNA, 65 bp, Mus musculus
tgatcgtcttcgggagacacaggccattaacagcagtctgtctacactgggactggtcataatgg

SEQ ID NO: 28022 - DNA, 65 bp, Mus musculus
tgaagaaccaaggtccagtgatccctgagccagtgaagagccaagaccccattatcccagcacta

SEQ ID NO: 28023 - DNA, 65 bp, Mus musculus
taagcggtttggaaccatgggcccaataagttggggtgcgaaccccctttcggcgggtaaaagaa

SEQ ID NO: 28024 - DNA, 65 bp, Mus musculus
gagagactgaaaacttgcccggttttagaaatactccagcgtccagtgtttgcctttgtctgtgt

SEQ ID NO: 28025 - DNA, 65 bp, Mus musculus
tcaaggacctccctgcaatggtacacccgaacccagcacaagatgagaagacccagcttgttaat

SEQ ID NO: 28026 - DNA, 65 bp, Mus musculus
tcattccctaggaccccatgagcatcttcaccatgagggccaagcccaggttgcttctatttgct

SEQ ID NO: 28027 - DNA, 65 bp, Mus musculus
agtatgtccctcgagctatcttggtggatctagaacctgggactatggactccgttcgctcaggt

SEQ ID NO: 28028 - DNA, 65 bp, Mus musculus
tgttcacttgaggaaggtcaagttccaggccaaactagaacacgagtacatccacaacttcaagg

SEQ ID NO: 28029 - DNA, 65 bp, Mus musculus
aagacacacacaatgctgggcagcccagagcaacctggagtgattcctcgggctctcatggacct

SEQ ID NO: 28030 - DNA, 65 bp, Mus musculus
ggactgggaatggacttctcatctgactaacttgcagtctgactccatatcctgagttttgccag

SEQ ID NO: 28031 - DNA, 65 bp, Mus musculus
caccagtccctgtgcacaagtggccacccacccagcgaatcgacgtggtgtgcttatcaaaatct

SEQ ID NO: 28032 - DNA, 65 bp, Mus musculus
ttgaagttaggactaaaggtggctacaccgtcagatcagacccagcagcctagggagcacggaaa

SEQ ID NO: 28033 - DNA, 65 bp, Mus musculus
gtaaagccactggatatgattgtgggcaaggcgtggaatatgttctcatccaaagcctttatcca

SEQ ID NO: 28034 - DNA, 65 bp, Mus musculus
cgtcttagaaacagtcgttctgatcaacccttcagatgaagccgtcagcactgaggtgcgtttga

SEQ ID NO: 28035 - DNA, 65 bp, Mus musculus
ctacgcctactgtagcattcctacctatcccagcggccagatcggcttcatgctgtgtagcaaaa

SEQ ID NO: 28036 - DNA, 65 bp, Mus musculus; identical to SEQ ID NO: 23716

SEQ ID NO: 28037 - DNA, 65 bp, Mus musculus
ttcaaagccttagcggggtctttgggttttcctctgttgcggagttgggggttccggtaagttaa

SEQ ID NO: 28038 - DNA, 65 bp, Mus musculus
ggccaaggaagagcagcaagatgacacagtctacatgggcaaagtgaccttttcatgcgcggcag

SEQ ID NO: 28039 - DNA, 65 bp, Mus musculus
cgagcggcagtcagagcaacagagggaaacccttgctcaactgcagcaggagtttcagcgggccc

SEQ ID NO: 28040 - DNA, 65 bp, Mus musculus
catgtgtgaaatatggccactcaggctgaagtggtctgtgtcaggtacttccaaactgaacccat

SEQ ID NO: 28041 - DNA, 65 bp, Mus musculus
atgaaaaccaagatgctgagtcctctaatttagccgaggaagaaaatgagagcactgagaatacc

SEQ ID NO: 28042 - DNA, 65 bp, Mus musculus
aaaacggaccacaagtacatggggttacctcactcctcaggctcctcctactgctagaatcggct

SEQ ID NO: 28043 - DNA, 65 bp, Mus musculus
actaacttccaagagacatttcctgtgctggagagtccagtgtcccaagctggagcagtgagact

SEQ ID NO: 28044 - DNA, 65 bp, Mus musculus
gacctgaacttcccagagatcaaaaggcggaaggtggaagacaggaaggatgaagacaggaaaga

SEQ ID NO: 28045 - DNA, 65 bp, Mus musculus
gttacgggttttctccattgcatcgttagccatggtgacaagctacaagattctcacccttctgt

SEQ ID NO: 28046 - DNA, 65 bp, Mus musculus
caatggagacgagattcttactggccgataacctgtactgcaaagcttcagtccctcctactgat

SEQ ID NO: 28047 - DNA, 65 bp, Mus musculus
ctttgcataacttaatgtgtcaaataaatgagttcatctaaataaaattgtttgttttatacttt

SEQ ID NO: 28048 - DNA, 65 bp, Mus musculus
gccaactaggttttcattcctgaaggcactgaggggtctggacgtgggtaggcttagagatgtaa

SEQ ID NO: 28049 - DNA, 65 bp, Mus musculus
gcagagagtagtaccagtttgccacctgtcgctgatgaaagcccagtcactgtaaaaccagatag

SEQ ID NO: 28050 - DNA, 65 bp, Mus musculus
ctgagcgtatacaggtacttgctaccctccttgatgttgatcttagggccttgaagatgctaagg

SEQ ID NO: 28051 - DNA, 65 bp, Mus musculus
gttcgttgggcacagggtggcaaggaagttgcggtaggggactcagaaggccgcatttggatcta

SEQ ID NO: 28052 - DNA, 65 bp, Mus musculus
gggtgattctgaaggacagattgtcatctatgatgtgggagagcagatcgctgttccccgaaatg

SEQ ID NO: 28053 - DNA, 65 bp, Mus musculus
agctcatctacaagcgaggctacggcaaaatcaacaagaagcggattgccttgacagataattcc

SEQ ID NO: 28054 - DNA, 65 bp, Mus musculus
tttccgaagccataagaaacaaagccaggttatccatcactgggagtgtgggagaaaacggccgt

SEQ ID NO: 28055 - DNA, 65 bp, Mus musculus
tgatcacctccgctcccccgttttccaatctacgaggcagccatggcgcccagccggaatggcat

SEQ ID NO: 28056 - DNA, 65 bp, Mus musculus
ttctggccccagaaacgagatcctgaccacatgaacaatttgggtttttttgggagaataaaaga

SEQ ID NO: 28057 - DNA, 65 bp, Mus musculus
aagaccagttcgccaagaggactcaggccaagaaagaacgcgtggccaagaatgagctgaaccgt

SEQ ID NO: 28058 - DNA, 65 bp, Mus musculus
cctggcatgggaatgaatgtcagtgtgactgatctctcgtgattgataggaaccttctgagtgcc

SEQ ID NO: 28059 - DNA, 65 bp, Mus musculus
ggtagcaggatctagaaagcactgattcaaagtcctggggtagtacagcctagaaggaaaggcac

SEQ ID NO: 28060 - DNA, 65 bp, Mus musculus
ttttgtcgtgctgatctgtggcctcatcattgctgtcttcgtggcggtcatggagttcatctggt

SEQ ID NO: 28061 - DNA, 65 bp, Mus musculus
caataaacctgaaaacaagttaagaaaagaaaaaagagaaggagggagaagaggaaaggggagag

SEQ ID NO: 28062 - DNA, 65 bp, Mus musculus
ggggaattgacttgatgggtcaaatgcttgccacgtaagtctgagggtcagagtttagatcccca

SEQ ID NO: 28063 - DNA, 65 bp, Mus musculus
tccttctgtggcaagaccaagatgaagagacgagccgtcggcatctggcactgtggttcctgcat

SEQ ID NO: 28064 - DNA, 65 bp, Mus musculus
caagagctcctgagccccacacgcccgaagcaataaagagtccactgacttccattaggcctcct

SEQ ID NO: 28065 - DNA, 65 bp, Mus musculus
tggccaagtctaaccgctgatttcccagctgctgcctaataaactgtttcctttggaacaactat

SEQ ID NO: 28066 - DNA, 65 bp, Mus musculus
agctctccaaggttggcttccccacgacgcagtcgggagtgtgcagcatacccaggtgtcatcat

SEQ ID NO: 28067 - DNA, 65 bp, Mus musculus
gtcccaacactgtagggtgctcctgttgtcaaaacctatgcagaggcatctgcttgctctctaat

SEQ ID NO: 28068 - DNA, 65 bp, Mus musculus; identical to SEQ ID NO: 1797

SEQ ID NO: 28069 - DNA, 65 bp, Mus musculus
cttctgtagcgccatggtggaagaactgagaatgtctctgaagtgccagcgtcggctcaaacata

SEQ ID NO: 28070 - DNA, 65 bp, Mus musculus
tggttaaggactatggcaaagaatctcaggccaaggatgtcatcgaggaatacttcaagtgcaag

SEQ ID NO: 28071 - DNA, 65 bp, Mus musculus
aggatgctgaagaagcagactgcagggcttgtgctttggggtgctatcatctttgtgggctggaa

SEQ ID NO: 28072 - DNA, 65 bp, Mus musculus
cacgcagcttttgtgccatcttcctctgcccatcaatgtgtcatgcagagtgtctgaatctgctt

SEQ ID NO: 28073 - DNA, 65 bp, Mus musculus
cggcagcactacctacaacatcgttttgtagttcatcatctttccaactggcattgcattggatt

SEQ ID NO: 28074 - DNA, 65 bp, Mus musculus
ggagcccccttgaaccaactgatgcgctgtcttcggaaataccaatcccggactcccagccccct

SEQ ID NO: 28075 - DNA, 65 bp, Mus musculus
aaccaggttctggtcctgtcgttcacacctgctagctgtgcaaacttaggcaaatagcctttgag

SEQ ID NO: 28076 - DNA, 65 bp, Mus musculus
tggtggacatgtctgctcagatcgcttcaggcatggcctatgtggagcggatgaactatgtgcac

SEQ ID NO: 28077 - DNA, 65 bp, Mus musculus
cctgtcctctacaaagatgacttccccgagaaactgaagagcttccccaacattggcagcttatg

SEQ ID NO: 28078 - DNA, 65 bp, Mus musculus
aaaactcaactaggctgtgggttggaaagggaaatgcaaagcagcaatgaggaaggcagagttag

SEQ ID NO: 28079 - DNA, 65 bp, Mus musculus
ccccaggagaatatctgtggcactcttgaagactgctcatatcaatctcaaaccagatgaggaca

SEQ ID NO: 28080 - DNA, 65 bp, Mus musculus
catttgaaccactgaataagccagacagcaccatccaggatgccggctataccaaggacaggtgt

SEQ ID NO: 28081 - DNA, 65 bp, Mus musculus
cacctgcactggtgagggaagtgactatgtccctgagtcctagatggtgacgttggtcccttcaa

SEQ ID NO: 28082 - DNA, 65 bp, Mus musculus
agcgcctattgccagcatccactctgtcgacctggacttgctttaaggccaagatctctctccca

SEQ ID NO: 28083 - DNA, 65 bp, Mus musculus
tttaaggaagccagaaacctacagcatcccatggaccatacaaagagtgtcctctgaggttggcc

SEQ ID NO: 28084 - DNA, 65 bp, Mus musculus
tcaggttgtcttgccagcccatgctcagtgtggatgatttccaactccaaccacctgtcaccttc

SEQ ID NO: 28085 - DNA, 65 bp, Mus musculus
tggtcagggaaaatgtctaggagcagttcccaaaactcaccaggctctatgtaaccacaccgagc

SEQ ID NO: 28086 - DNA, 65 bp, Mus musculus
tccagaccaacccgcagtctgttcactgcattcaccgtagtgcaacttagatctcctgcagagta

SEQ ID NO: 28087 - DNA, 65 bp, Mus musculus
ctaagcaccaaagcatgtgtttcccaaaggggttttactaggctcttacaggccaagtggatgct

SEQ ID NO: 28088 - DNA, 65 bp, Mus musculus
gcctggtgacagagaagaatgtcctgaagatcagcgactttgggatgtcccgcgaagaagctgat

SEQ ID NO: 28089 - DNA, 65 bp, Mus musculus
aagactcttgcaaccagaatactgtccagacgccttgtacgaagtgatgctaaaatgctggcacc

SEQ ID NO: 28090 - DNA, 65 bp, Mus musculus
gccttgttcctgaaaatgataggcccaactcatggccagatgacagtgacacggcttgtgaatac

SEQ ID NO: 28091 - DNA, 65 bp, Mus musculus
actcattttgctcatttcttcaagggtttgagtgccagccatgtataccaggctctgtgcccagg

SEQ ID NO: 28092 - DNA, 65 bp, Mus musculus
agtggcctctcctgtcctgcctgctcaagagaagctaaaagccccttgcttatgtacctgctctt

SEQ ID NO: 28093 - DNA, 65 bp, Mus musculus
aaagctgacatctactcttttggaatcaccctgtggcagatgaccaccagggaggtgccttactc

SEQ ID NO: 28094 - DNA, 65 bp, Mus musculus
ggacccaagtgtgcagaggtggcatccagtgtgggccctagcactccagagactggcccgggcgt

SEQ ID NO: 28095 - DNA, 65 bp, Mus musculus
ggtggtagtggataagcatggcatggataaagaacgttatgtctccttagtgacacccatggctc

SEQ ID NO: 28096 - DNA, 65 bp, Mus musculus
aagaccagtgacgcagtggtgcaaacagaggacgtggccacttctaagaccaactctagcacgtc

SEQ ID NO: 28097 - DNA, 65 bp, Mus musculus
accacgcctgtagcttcagccactcaaagtgtaagccggttacagagcatcgtcgctggattaaa

SEQ ID NO: 28098 - DNA, 65 bp, Mus musculus
tttggatttggctcatagttctgaaagccaggagatcatctcaagcgcgagagaacaaacagata

SEQ ID NO: 28099 - DNA, 65 bp, Mus musculus
tgaaaacccctcatgtaatgccaggctaggcccaagagacctgagacaactacatcagatgtctc

SEQ ID NO: 28100 - DNA, 65 bp, Mus musculus
gctggctgaagatgctgtgccgacatgtagccaacaccatttgtaaggcagatgctgagaatctt

SEQ ID NO: 28101 - DNA, 65 bp, Mus musculus
acatacagcgactgagccaagagcaccttgagagtcagcacctggaagaggagccttgaaggagt

SEQ ID NO: 28102 - DNA, 65 bp, Mus musculus
actgaccagacagttggttccaccagctctgcatcaagacacttccgtggcaagacaactaaatg

SEQ ID NO: 28103 - DNA, 65 bp, Mus musculus
cagcacagagtctgagggacgtcactgctcagttggaaagtgtgcaagagaagtacaatgacaca

SEQ ID NO: 28104 - DNA, 65 bp, Mus musculus
taactaaccataccctcttctacttggtaccctcctagctccccagcaagcccatcttgggccat

SEQ ID NO: 28105 - DNA, 65 bp, Mus musculus
agatcgagcaggtgaatgagcgagtcttgaacaggctccatcaggtgcaaaggataactcggaga

SEQ ID NO: 28106 - DNA, 65 bp, Mus musculus
tgggcatctgctatgatatgcgcttcgcggagcttgcacaaatctatgcacaaagaggctgccag

SEQ ID NO: 28107 - DNA, 65 bp, Mus musculus
ttccagttcgcagtccaggtctcactccggttccagagaacattccagatcccgtggttcgaaat

SEQ ID NO: 28108 - DNA, 65 bp, Mus musculus
ccttctcatcaactccgacatagtgtgtgaacaagacatctacgagtggaccaagatcaatggga

SEQ ID NO: 28109 - DNA, 65 bp, Mus musculus
ggggccgaagaattgtgagaacagaacagaaactcagggtttctgctgggtggagacccacgtgg

SEQ ID NO: 28110 - DNA, 65 bp, Mus musculus
tgccaaccagacaaggtgtacttaggtggactggatgtatgtggcgaggatggacagttcaccta

SEQ ID NO: 28111 - DNA, 65 bp, Mus musculus
gatggtagattaggatggagagtgggcgtagatgtgtgcaagagggtaagggtataggaaacggg

SEQ ID NO: 28112 - DNA, 65 bp, Mus musculus
ggaaccagcaacagccccagtgctaaccaccaatcttcctttgccagtagacctcgaaaatcatc

SEQ ID NO: 28113 - DNA, 65 bp, Mus musculus
cggaactgcctcgtaggagaggagatggtggttaagatcgccgacttcggtttatccagaaacat

SEQ ID NO: 28114 - DNA, 65 bp, Mus musculus
taatgcaatcctgctgggcttttgactcaaggaagcggccatccttccccaacctgacttcattt

SEQ ID NO: 28115 - DNA, 65 bp, Mus musculus
ccatgatccagtgcagacaacgactgtcagatcggaatgtcagtactcaacaagagaagcacccg

SEQ ID NO: 28116 - DNA, 65 bp, Mus musculus
atgtgccaatggtgctggtgggcaacaagtgtgacctggctgctcgcactgttgagtctcggcag

SEQ ID NO: 28117 - DNA, 65 bp, Mus musculus
gcttgtcatgaaatgtcaacgaaggacactgagaaagagaatactcagagccccgttcttgtgaa

SEQ ID NO: 28118 - DNA, 65 bp, Mus musculus
ggtgtcggcaacagcaactgcaaaagagaatcgcgtacctcagtggctactaaccgaccagaacg

SEQ ID NO: 28119 - DNA, 65 bp, Mus musculus
gttagtgttgctgctgttaggtctgatgttcttgtagttcctgctcttgtgtgcgaataaagcag

SEQ ID NO: 28120 - DNA, 65 bp, Mus musculus
attgccaagtttgactacgtaggccggacagcccgagaactgtctttcaagaagggagcatccct

SEQ ID NO: 28121 - DNA, 65 bp, Mus musculus
gtgagtgattgaagataggttttcccccagcagacaagtgaactcagaatgtgtgcaaattttac

SEQ ID NO: 28122 - DNA, 65 bp, Mus musculus
caccatattgcaacaagattgaaacatgtgtaactgttcacttgtggcagatgaccagatacccc

SEQ ID NO: 28123 - DNA, 65 bp, Mus musculus
agccctcatcctgttctgtactctccactctgacctggctttgacatctgctggaagaggcaagt

SEQ ID NO: 28124 - DNA, 65 bp, Mus musculus
ctgcagaccagaactgtgaagatgcggttccgatgcgaagatggagagatgttttccaagaatgt

SEQ ID NO: 28125 - DNA, 65 bp, Mus musculus
ctctttcctgtgacctctttccccactgtctggaaccatagcaaaaggatactgcatctcttgtt

SEQ ID NO: 28126 - DNA, 65 bp, Mus musculus
taaccaaccgaggcactgcagataaactccgaagcccagtgtcatgtaacatgcccatgccatct

SEQ ID NO: 28127 - DNA, 65 bp, Mus musculus
acagtgggtgccaggaaaccttctgtgagcccaccaactgccagacagcctatgtggtctccaga

SEQ ID NO: 28128 - DNA, 65 bp, Mus musculus
ctctgaccccaagtctctgatctagcttcttcccagctcctagtagatagagatggggattctca

SEQ ID NO: 28129 - DNA, 65 bp, Mus musculus
gctggtttggaggtcctgttgtcatgtacgagactgtcaccagttaccgcgctctgtttgaaaca

SEQ ID NO: 28130 - DNA, 65 bp, Mus musculus
tttcaagccccaggtcacctctgagactgacaccaggtatttcgatgaggagttcacagctcaga

SEQ ID NO: 28131 - DNA, 65 bp, Mus musculus
ggagccaatgttttgagtgtctgagattctaaaggtccacagtctagagtattaggtacgactcc

SEQ ID NO: 28132 - DNA, 65 bp, Mus musculus; identical to SEQ ID NO: 23716

SEQ ID NO: 28133 - DNA, 65 bp, Mus musculus
cacacatggactctgactctgtacatgaaacctgtgcgtgtgtcacacataatgcagtttctgtc

SEQ ID NO: 28134 - DNA, 65 bp, Mus musculus
cctccatgctaggcaacaaatgcttaccatgtgcctcacacactccatgattgggcctatcttct

SEQ ID NO: 28135 - DNA, 65 bp, Mus musculus
agggacctagctgcccgaaacgtgctagtcaagagtcccaaccacgtcaagattaccgacttcgg

SEQ ID NO: 28136 - DNA, 65 bp, Mus musculus
tcagggagcaggagcaccagtccaaaccccttagaagcctgtttggaagcagaagaggctggtct

SEQ ID NO: 28137 - DNA, 65 bp, Mus musculus
cgggcctgggatatagccatcctggattgggttcatcagaggagattgaagggcggatgagggga

SEQ ID NO: 28138 - DNA, 65 bp, Mus musculus
taacgacaggcagagtttcaatgaggtgggcaagctcttcacacagatcctcagagtcaaggacc

SEQ ID NO: 28139 - DNA, 65 bp, Mus musculus
ctctcagcctagagaagttcgagcatcctagaggggcttgaacagttatctcggttaaaccatgg

SEQ ID NO: 28140 - DNA, 65 bp, Mus musculus
ataagtcgcccagcagcctcttagaagatgccaaagagacatgctttaccagggataggaagggg

SEQ ID NO: 28141 - DNA, 65 bp, Mus musculus
taccgcccctcatccagtcacaatgtaccctcatcccaggaatttgtctcaggaaacatagcgcg

SEQ ID NO: 28142 - DNA, 65 bp, Mus musculus
acctagaatagagctgtctgccacagcctcctaaaacaaacgtttacagttgttaaagccacagt

SEQ ID NO: 28143 - DNA, 65 bp, Mus musculus
aatcagggaagaatggtgtgcctgcttctcaagtgagggagccaggagacaaagatggcttcatg

SEQ ID NO: 28144 - DNA, 65 bp, Mus musculus
agaaccaacgcagatgtgatgagcgcactgtcacagggatatcgaatgccacgcatggagaactg

SEQ ID NO: 28145 - DNA, 65 bp, Mus musculus
gtgccagtgtcaaggagagccttctaattccccatagcttatgagcagtgtatctgttgtagcag

SEQ ID NO: 28146 - DNA, 65 bp, Mus musculus
gcagtggtgaatgtgatgcagcaggagaacttggagctgaaaagcaagtatgaggacctcaacac

SEQ ID NO: 28147 - DNA, 65 bp, Mus musculus
ctcttcatcatggaagcctgtcactgtaggacagaatagaactctatcacttgaagtttagacct

SEQ ID NO: 28148 - DNA, 65 bp, Mus musculus
agcaggtagtggcctcactgcttggggaccactatgtgcagctgacagcagcttatgtgaacgta

SEQ ID NO: 28149 - DNA, 65 bp, Mus musculus
tgacttaagactctgtctcctgggaatgtttctgtaatcccatctacctgcccagagctgtgccc

SEQ ID NO: 28150 - DNA, 65 bp, Mus musculus
ccagcctgaagaacatggtagaccaactggccaactgtgaggacattctcatgaatttcctggtg

SEQ ID NO: 28151 - DNA, 65 bp, Mus musculus
caatcctcgggaccaggttttgcaccaaggcacatgcacatactactgagcacagatcctcccaa

SEQ ID NO: 28152 - DNA, 65 bp, Mus musculus
agggacacagcttgggacacagtctcacacagcctcttctaatgggctctcggggccatttgtaa

SEQ ID NO: 28153 - DNA, 65 bp, Mus musculus
agtcccactccctgagaagaggcggtctatcctaagggaacccacatttcgctggacctcactaa

SEQ ID NO: 28154 - DNA, 65 bp, Mus musculus
cagcctcgcagaagtcccagcccagtgaagtacagactgaagtttcgctttggatgatgctcatc

SEQ ID NO: 28155 - DNA, 65 bp, Mus musculus
ggtcgggatgcagagatgttaaggtacgtaaccagtctggaggtgaaggaactgagacaccctaa

SEQ ID NO: 28156 - DNA, 65 bp, Mus musculus
caactcccgtactagaaaccacatcccggtacacaggcctttaccagcttttctacagccaacac

SEQ ID NO: 28157 - DNA, 65 bp, Mus musculus
accacaggtggcttatggctctcctggcctgtctgaaggcctgaattatgcctgtcttgctcaca

SEQ ID NO: 28158 - DNA, 65 bp, Mus musculus
ggttcgcagatcggggccacactgtagttggtgtggaaatcagtgaaattgggattcgggaattt

SEQ ID NO: 28159 - DNA, 65 bp, Mus musculus
agatcagaccgacgtatgcagggagcaagagcgccatggagaggctaaaacgaggcatcattcat

SEQ ID NO: 28160 - DNA, 65 bp, Mus musculus
gaccacgcataactgatgtagccacatagagaggagtaggctgtcggcttattgacgtctccaaa

SEQ ID NO: 28161 - DNA, 65 bp, Mus musculus
ttagagcccaccaccttcctgcctgtggccgagctgcacggactccgaggtcacagcacggagga

SEQ ID NO: 28162 - DNA, 65 bp, Mus musculus
agagtcatcagagggccatgtgacgggctctgaggctgaactccaagagagagtatcaatgtgta

SEQ ID NO: 28163 - DNA, 65 bp, Mus musculus
atgtgtttgatggtgacctggcagtgggggtaaccaaaggactgcagagcctctctccacatgac

SEQ ID NO: 28164 - DNA, 65 bp, Mus musculus
acgtccgagccaaacccaggatttacagggaatgaagagagagcaactgttggtcaggactttcc

SEQ ID NO: 28165 - DNA, 65 bp, Mus musculus
gagacctgcgactgcattgctgctgcataaagcatgtggtctttagtgtgtggacagctgacaaa

SEQ ID NO: 28166 - DNA, 65 bp, Mus musculus
cctggatggggctatttaggtctaacccctgtcttaccctgagttcctaagaagccaacctctta

SEQ ID NO: 28167 - DNA, 65 bp, Mus musculus
gtggactatgaagatgaggaagctgcagtagttcagtatagtgacccatatgcagatggggaccc

SEQ ID NO: 28168 - DNA, 65 bp, Mus musculus
ggatcacgatgtgcctctctccggttaaaggcgcaaagctcatcctgatctttctgttcctagga

SEQ ID NO: 28169 - DNA, 65 bp, Mus musculus
gccttggacctctacaacactgagatcctcaaacagtctgaccagatgacagccaaactctgcta

SEQ ID NO: 28170 - DNA, 65 bp, Mus musculus
agctagatcagctattttcagggcctttaccagggagactcccagtcaaccacaggccattctct

SEQ ID NO: 28171 - DNA, 65 bp, Mus musculus
cctttctctgaacggtcacggccagtgtcatgtccagcacctgtggttccagtccgtgtttgata

SEQ ID NO: 28172 - DNA, 65 bp, Mus musculus
ctccccttccactccttccagcttccagacaaactgcctggagacagtgactgcattccaccttt

SEQ ID NO: 28173 - DNA, 65 bp, Mus musculus
gatgggtccagagtgggaatcaagtcctttgctgaaggacctatgtgggaagaccgcttgcagag

SEQ ID NO: 28174 - DNA, 65 bp, Mus musculus
ctcccactccacctcacttgaagtacctataccttgtggtgtccgattctggcatctcaacagat

SEQ ID NO: 28175 - DNA, 65 bp, Mus musculus
ataaagccttccgctcacacctcctacctccgaagcatttcacagaagatggcaatgtcctgcag

SEQ ID NO: 28176 - DNA, 65 bp, Mus musculus
gacatcgacccctttgagatggccgcttacctgaaagatggttaccgaatagcccagccaatcaa

SEQ ID NO: 28177 - DNA, 65 bp, Mus musculus
tacacaacaaggaatgcccatgccctacagagccacaaccagcaccataccagaggctccagtag

SEQ ID NO: 28178 - DNA, 65 bp, Mus musculus
atgctgaggatgacggggaggaagacgacgattagacctccaggaccaggccacctgacactcct

SEQ ID NO: 28179 - DNA, 65 bp, Mus musculus
attgttcaacaggtgactcactgcctggcaaacccttttatccccagatgttactcatgataaca

SEQ ID NO: 28180 - DNA, 65 bp, Mus musculus
gaggcagcagcagttgctaaagaagatcgaacacgctcggacttgctaaacgtttcccacacgga

SEQ ID NO: 28181 - DNA, 65 bp, Mus musculus
cagcacctgaggcactttcccgagggcattactccatcaagtctgacgtgtggtcctatgcaatt

SEQ ID NO: 28182 - DNA, 65 bp, Mus musculus
aggctatgtactggtggccatgaatgaattctctgtactgcccttacctaacctccgagtggtcc

SEQ ID NO: 28183 - DNA, 65 bp, Mus musculus
gagcgtgcgttactcagtgtccccaaacatttgtctacaatccaaccacctttcaactggaacac

SEQ ID NO: 28184 - DNA, 65 bp, Mus musculus
gctgagcctgccatttgaagcaaggttgaatgcctccatgggtcctggacgaaccgttgtcatta

SEQ ID NO: 28185 - DNA, 65 bp, Mus musculus
gcagaagtctcaccttttccgatgagtttgagttaggagcttttgccttgtagcagagcagtatt

SEQ ID NO: 28186 - DNA, 65 bp, Mus musculus
ctgtgtcttctctatcacagagatggagtccttcgcagctaccgcggacttcagggagcagattt

SEQ ID NO: 28187 - DNA, 65 bp, Mus musculus
atatacagcatcatgcagtcctgctgggacctggagcctaccagaagacccaccttccaacagat

SEQ ID NO: 28188 - DNA, 65 bp, Mus musculus
aagtcaagctgtgggaggtgacagtgacagaccggaggacactgattgaacccttcactttactg

SEQ ID NO: 28189 - DNA, 65 bp, Mus musculus
ttttgcctccaactctctacaaaggcgcaagaaagggctcctgctacgaccagtggcacctctgc

SEQ ID NO: 28190 - DNA, 65 bp, Mus musculus
cagacttctactgatccttttaccacttcaagtacggaccctttcagtgcatccagcaacagcag

SEQ ID NO: 28191 - DNA, 65 bp, Mus musculus
gatcaccgagaagtctactaagacacaaagttctgttcctgctcctgatgatgcctacccagaaa

SEQ ID NO: 28192 - DNA, 65 bp, Mus musculus
ccttcagttatcacttcgctagatgaacaggacacccttggccacttcttccagtaccggggaac

SEQ ID NO: 28193 - DNA, 65 bp, Mus musculus
agtggctgacgtactgggtggtatatggtgtgttcagcattgccgaattcttctccgatctcttc

SEQ ID NO: 28194 - DNA, 65 bp, Mus musculus
gagcagagcatcatgggagttgacctttaccctacctttgacactgactgtcctccaattttgca

SEQ ID NO: 28195 - DNA, 65 bp, Mus musculus
ccacttgggcaggctagagtcccagacagactgtgtgttaccaagacccatgagtggcaaatatt

SEQ ID NO: 28196 - DNA, 65 bp, Mus musculus
aaaggagctgaagctgcagattggcaagtcgtccaagccctccaaggactaagagctgaagaaga

SEQ ID NO: 28197 - DNA, 65 bp, Mus musculus
tcccctgaactgcacgtgtccttccctactttggaagctgttaagagtctaccaggcacacagat

SEQ ID NO: 28198 - DNA, 65 bp, Mus musculus
ccgcgtgcttatctagacaagcgtcatccgactcagattccattctgtcactaaagtccggcatt

SEQ ID NO: 28199 - DNA, 65 bp, Mus musculus
ctaacgaagctgtcagtgctggtgtctctgctgttacgcctgttggtgactgggagtgtaagttt

SEQ ID NO: 28200 - DNA, 65 bp, Mus musculus
gagcttaacgagagtggagtaccggtgtatggggtgggtacctcataagaggtgaatctcacaaa

SEQ ID NO: 28201 - DNA, 65 bp, Mus musculus
agaatgtggagtcgatcttcatgtgcctggcttgccgacttaaggcccagaaatccctcttgtac

SEQ ID NO: 28202 - DNA, 65 bp, Mus musculus
ggaaatcgatagcatttgcagtatagagcgtgcagataatgacaaggagtatcttgtactcaccc

SEQ ID NO: 28203 - DNA, 65 bp, Mus musculus
gggccatcgcagccatgaggtatgcagagacacatcaggtatatgctctcgtattggtgtctgca

SEQ ID NO: 28204 - DNA, 65 bp, Mus musculus
tactggtcagcctttgggaacctgcataacatctccttgcttttctccaccatcaacagcagcgc

SEQ ID NO: 28205 - DNA, 65 bp, Mus musculus
tccaccttcaactgccgctgggaccaccacagctaccaatgggggcacttcgaactgcctgcaaa

SEQ ID NO: 28206 - DNA, 65 bp, Mus musculus
agagggtctcctgagaagactgggtcctcttgccctgatgtctactctgtgacatgagtgtttta

SEQ ID NO: 28207 - DNA, 65 bp, Mus musculus
ttgcccttcgatgacctgaaaatctccggcaaaccactgctatgtactgactgaagctcggatgg

SEQ ID NO: 28208 - DNA, 65 bp, Mus musculus
ccagaagagagtaccttgtgcttatgacaagactgccttggcattggaggttggtgacattgtga

SEQ ID NO: 28209 - DNA, 65 bp, Mus musculus
aagtgtgtgggaggacctaccccatgaagcccaactggttgcgcttgatccatgatcctgttaac

SEQ ID NO: 28210 - DNA, 65 bp, Mus musculus
ttttatagagggtgcaaatggagacgagaaactcatctcttacctcctctgaccccaagtgttca

SEQ ID NO: 28211 - DNA, 65 bp, Mus musculus
tgccttcatagatcagcactatgggcacctgatagacactgtgctcgtgaggcaggacctgcagg

SEQ ID NO: 28212 - DNA, 65 bp, Mus musculus
cagcttcgaaactctggtgcataaactgacctaactcgaggaggagctggaatctctcgtgagag

SEQ ID NO: 28213 - DNA, 65 bp, Mus musculus
ttggaatggcacccttttaggccatttacgcggcggttttgtgttacgcggaccggtaatttgag

SEQ ID NO: 28214 - DNA, 65 bp, Mus musculus
agtgctggtgtgtgaaccccaataccgggaagcccatccagggagctcccaccatccggggagac

SEQ ID NO: 28215 - DNA, 65 bp, Mus musculus
ttgccaggctacgacaccaaggggaaagacgacgtacattgcctcagcgtgcagagccagtagat

SEQ ID NO: 28216 - DNA, 65 bp, Mus musculus
acgtgggctctatgtgccaaactgtgacctcagaggcttctaccgaaagcagcagtgtcgttcct

SEQ ID NO: 28217 - DNA, 65 bp, Mus musculus
tcttcgtgcaaggcctaggcgagaatgttacaattgaatctgtggctgattacttcaagcagatt

SEQ ID NO: 28218 - DNA, 65 bp, Mus musculus
ccgaggtcatgtcattaggaagtcaaagaacaacaagactggagatgaagaagtcaaccaagagt

SEQ ID NO: 28219 - DNA, 65 bp, Mus musculus
tttgccttctagaacagtagacacgaaacaggctcaggagttagcaaggagttacgggattccgt

SEQ ID NO: 28220 - DNA, 65 bp, Mus musculus
gctggtttcttgaacatgcgttccagtcccgtgacatgtgaacacataggttcatgcaggtgatg

SEQ ID NO: 28221 - DNA, 65 bp, Mus musculus
ccagcacctccgcactgtcttgtcaagatatgaggggaagatggagacgcttggagaaaatgagt

SEQ ID NO: 28222 - DNA, 65 bp, Mus musculus
cctggcaagggtggctgatggttaggctgcacacttaagaagcaaacgggagcagggaaggcttg

SEQ ID NO: 28223 - DNA, 65 bp, Mus musculus
ccctttggcctcacaagacaactagtgtctctgacttatgaacttgccttcttcctcacgggtcc

SEQ ID NO: 28224 - DNA, 65 bp, Mus musculus
agccacacttcgctagccctcaaatgcgtcttccggccaaaggctccgaggttgggatcccggaa

SEQ ID NO: 28225 - DNA, 65 bp, Mus musculus
taacaaactggatactgaacctcagtgggtgccatccacctggctaaggtgaaggaaaggactgt

SEQ ID NO: 28226 - DNA, 65 bp, Mus musculus
gctgccttccaccctctccatagtgtgtggctaaatgttctcgagcttcagacttgagctaagta

SEQ ID NO: 28227 - DNA, 65 bp, Mus musculus
atctgattgtctgtggattctgtcaaggaaagcttcaggggctggtacagaggaccacatggctg

SEQ ID NO: 28228 - DNA, 65 bp, Mus musculus; identical to SEQ ID NO: 23716

SEQ ID NO: 28229 - DNA, 65 bp, Mus musculus
aaatggctgcattgttcacggcaagactggacacctcatgtcatgtttcacgtgtgcaaagaagc

SEQ ID NO: 28230 - DNA, 65 bp, Mus musculus
tcatgaggatgtgattctggagatggggtgttcgtaagcaccgctctcttacgtcactcccttct

SEQ ID NO: 28231 - DNA, 65 bp, Mus musculus
tggaaactacttcctccagaagatatcctgccatcacctcactgcatggacgatctgttgctgcc

SEQ ID NO: 28232 - DNA, 65 bp, Mus musculus
actgtggcttcatgggaggccttcagaagaacagaagcactggactgaccactccctattttgct

SEQ ID NO: 28233 - DNA, 65 bp, Mus musculus
ggtcttgtgcctcatgttcatgcactcagaagtcatcaacaaggtgtcatctggcataagggatg

SEQ ID NO: 28234 - DNA, 65 bp, Mus musculus
gagagggtctctcaactctgctcctcacctgcagaagccagtttgtttggccatgtgacaattgt

SEQ ID NO: 28235 - DNA, 65 bp, Mus musculus
tcacactgggaccctacgcacgagaggagggacaggagtgacactgtttgtggcgctttatgact

SEQ ID NO: 28236 - DNA, 65 bp, Mus musculus
gcccacaaagacaaaatgcacgagtctggctatggatgctgtgaacactgaccccaccaaggccg

SEQ ID NO: 28237 - DNA, 65 bp, Mus musculus
gagcgtgatggcacggagtcctatctcactgtgagctcccatcccaattccttgatgaagaagat

SEQ ID NO: 28238 - DNA, 65 bp, Mus musculus
ttggttaagacacagacacagccaactgggaggtgatgctactgtgacttgtaggcaggacacaa

SEQ ID NO: 28239 - DNA, 65 bp, Mus musculus
gatcctaccggtgcaactgaagctggttgaaagcaccatggagaagaacttcctgcaagataaag

SEQ ID NO: 28240 - DNA, 65 bp, Mus musculus
gtacaagttgaggttcatgagccctgttaagtccccagttactacacactacaggtgcccttgcc

SEQ ID NO: 28241 - DNA, 65 bp, Mus musculus
aactgcatcgagtgcttcacttcccaagggttgcagagcatctaccacctgcagaaccttaccat

SEQ ID NO: 28242 - DNA, 65 bp, Mus musculus
tttagccttggtgtgtatccgaagaagctgcctacatcggagacgcaccttcacttaccagtcag

SEQ ID NO: 28243 - DNA, 65 bp, Mus musculus
tcggaagaactcctgtccctcaagtatgagaacgactacccttctgtcattctccaggaccctct

SEQ ID NO: 28244 - DNA, 65 bp, Mus musculus
cttgagggatctctactgagttccttgttggggtaggtcaacttgtgcttccaagtgtaagatca

SEQ ID NO: 28245 - DNA, 65 bp, Mus musculus
tggagagagtcctgtaccactcacgagagccgatggcactagcactgggttcccaagatatgcaa

SEQ ID NO: 28246 - DNA, 65 bp, Mus musculus
atgatgatgggcaacgttcacgtagcagctcttctgctcaactacggtgcagattcgaactgcga

SEQ ID NO: 28247 - DNA, 65 bp, Mus musculus
gttatgatgtgtctcctctggtggccagctcctgccaagatcacttcacactctctcatccaatt

SEQ ID NO: 28248 - DNA, 65 bp, Mus musculus
gacctgcctcttcctccagctgctgggagttaaaggcttctgtcaccaggactagcccaatacat

SEQ ID NO: 28249 - DNA, 65 bp, Mus musculus
atgtccctgcctctttccacttcccctacgttcacttccggttcatttctctacctccactctgt

SEQ ID NO: 28250 - DNA, 65 bp, Mus musculus
ggaacctgtgtaattggtggcactttatggctgtaagatgcatagcattgtgacccagggtttgc

SEQ ID NO: 28251 - DNA, 65 bp, Mus musculus
gtcgtggaccggtatcatcacttttcctgcggtgacttctccaaactgaaactgctaaggcagtt

SEQ ID NO: 28252 - DNA, 65 bp, Mus musculus
cagggcagaaggcaacagcagctttcaataacgtgggaactgccatcagcaagaagtttggagat

SEQ ID NO: 28253 - DNA, 65 bp, Mus musculus
atattcctggaaagcccagaaaggagctaggggtgactcgtttagacgaggagatcccggaggat

SEQ ID NO: 28254 - DNA, 65 bp, Mus musculus
tatttccccagattctggccacgatcgagctactgcagcggtcactccccaagattgagcggagt

SEQ ID NO: 28255 - DNA, 65 bp, Mus musculus
accagtgttgcctcattcagctcacagaccatagccaaagcataagaacccacacagtagtctgt

SEQ ID NO: 28256 - DNA, 65 bp, Mus musculus
ctgctccggaaggcttggagattgcctaacactcccaaaccttgttggggaaacagcttcaggac

SEQ ID NO: 28257 - DNA, 65 bp, Mus musculus
gccttcccgtcatgtctaacgaagtagaaacaagcacaaccaatggccagcctgaccaacaggct

SEQ ID NO: 28258 - DNA, 65 bp, Mus musculus
aaatccgatattccctcctgccttttgccaacgagtcaggcacttcggcagctgcagaggtgaac

SEQ ID NO: 28259 - DNA, 65 bp, Mus musculus
gtattgaggaagccattcctgcagtttgcaagaccaggacggtcatttacgagatacctcggagc

SEQ ID NO: 28260 - DNA, 65 bp, Mus musculus
atagatactgtgaagctgctcaatcggaaatacaagttttggaacacttgaatacaacagacccc

SEQ ID NO: 28261 - DNA, 65 bp, Mus musculus
aacaagttgctgctctccgtcatcatcttgctggagctagccatcctggtcggtctggtgtatta

SEQ ID NO: 28262 - DNA, 65 bp, Mus musculus
gggctcagagcaacagtctgatgaagatgatcaacacacaagctccgatggaaacaaccgagatc

SEQ ID NO: 28263 - DNA, 65 bp, Mus musculus
ccgtatagctttcagtcagatgtgtatgcgtttgggattgttctgtacgaactgatgaccggcca

SEQ ID NO: 28264 - DNA, 65 bp, Mus musculus
tgccgtttccctgactctccggcgtctctgtctttgtaaagtccacatgatctctctgtcatcag

SEQ ID NO: 28265 - DNA, 65 bp, Mus musculus
aaagtcaaaccagctgaggcggagacagcaggaaacatcatgtccttctttctgtgtctgggcct

SEQ ID NO: 28266 - DNA, 65 bp, Mus musculus
tgtagaggtggagaagaacagcaccccctctgagccagactctggccagggacctcctgcagagg

SEQ ID NO: 28267 - DNA, 65 bp, Mus musculus
acatctaccgaagtccaatgcaaaggcgggaatgtctgcgtgcaagctcaggatcgctattacaa

SEQ ID NO: 28268 - DNA, 65 bp, Mus musculus
ctggaaatgagcgtcaggaccatgagaggacacggctggcctctgagtctgccaatgatgacaat

SEQ ID NO: 28269 - DNA, 65 bp, Mus musculus
ccattcctttggaatctgccatcgagacattaaaccacagaacctcttgttggatcctgatacag

SEQ ID NO: 28270 - DNA, 65 bp, Mus musculus
tgtctgctcagagggaggtcaggcactccttgggtttacgtggctctgcatgtttgtatcggtgt

SEQ ID NO: 28271 - DNA, 65 bp, Mus musculus
ttgcacgtttgccttgccgtcagagttggagcgcagttatcagcgatttacagctttctacgcca

SEQ ID NO: 28272 - DNA, 65 bp, Mus musculus
acattgtctctggccacaagaagaagggtgatgaccagaaccggcaaactggtgctccagatgct

SEQ ID NO: 28273 - DNA, 65 bp, Mus musculus
agatcccagaaaccggctggtcctactgttatcacctttgagtgtgctaattgtgtccgtggtgg

SEQ ID NO: 28274 - DNA, 65 bp, Mus musculus
ctgtttcaaatcccagaaactggctgttcctactgatgctaattgtcttctgtatctgaagaaga

SEQ ID NO: 28275 - DNA, 65 bp, Mus musculus
agacttctggctcacttagacccccacattctccatccttgcactcgccactaccctagaaggat

SEQ ID NO: 28276 - DNA, 65 bp, Mus musculus
actgggagtcaggctcctgaggtgagccacgaggctatgaaatcagccatgatagtagaagcctg

SEQ ID NO: 28277 - DNA, 65 bp, Mus musculus
acattcacgtggactcagctttgtcaagccctacctgcccctacttcaggtttccttcaaccact

SEQ ID NO: 28278 - DNA, 65 bp, Mus musculus
ccgcccataattcctttcagagtactgtaggttcggggaaagtgagacagcagtgtccagtaaag

SEQ ID NO: 28279 - DNA, 65 bp, Mus musculus
cccagttgtgaggtggcttcttagtgggaaggctgggtttattcagcatcactgaacctaaaaca

SEQ ID NO: 28280 - DNA, 65 bp, Mus musculus
cattttctagtctaacttgcttcagggatctctgtctgcctatggagtgctcaggttacaggcag

SEQ ID NO: 28281 - DNA, 65 bp, Mus musculus
gagggagaaggtggaaatactgcagatgcaagcagtgaggaagaaggtgatagagtagaagatgg

SEQ ID NO: 28282 - DNA, 65 bp, Mus musculus
ttcgaagggtacgagcaggacttcgcagtgctcactgctgagatcaccagcaagattgcaagggt

SEQ ID NO: 28283 - DNA, 65 bp, Mus musculus
aggggaccctactgttatcccaagtgctcttattccggtgagaagaacctcacttccatgatttg

SEQ ID NO: 28284 - DNA, 65 bp, Mus musculus
ctgcttgctgacctttgaagtttgagatgagccaagacagagcccagtgcagctaactctcatgc

SEQ ID NO: 28285 - DNA, 65 bp, Mus musculus
gatgtcgctttgggccttgcatgacaccatgaagttggatgatacttctcagaccagcagtttcc

SEQ ID NO: 28286 - DNA, 65 bp, Mus musculus
aagaggggataatgtactgaaaccaggcttgaccccacatccctaaaccatccaccgtggagtgt

SEQ ID NO: 28287 - DNA, 65 bp, Mus musculus
acaaactggaccgcctcttcgagatcattggggtcaagagccaagaagccagccagaccctcttg

SEQ ID NO: 28288 - DNA, 65 bp, Mus musculus
ccgtgtgctgcaggaactgaacgtcacggtggtcaccttcctatgccgggaacacaacgtgtgca

SEQ ID NO: 28289 - DNA, 65 bp, Mus musculus
tgctactgtccggatgtgagtcttgcctaatctgtggaggctctagcccctgtcatcccctagag

SEQ ID NO: 28290 - DNA, 65 bp, Mus musculus
ccctcacagctcactatggagccaccttgaaccctgatcctgactgcagccgcattttcatggtc

SEQ ID NO: 28291 - DNA, 65 bp, Mus musculus
agggaacaagtcaccagagttttaaagagagaccaggcttgtgattgatgggagagacttctccc

SEQ ID NO: 28292 - DNA, 65 bp, Mus musculus
caactttgctgagaccagtgtttctgttgtgatcctgatagtgagtctgccctttgatgaagaaa

SEQ ID NO: 28293 - DNA, 65 bp, Mus musculus
atactggcacccagactgattggggccaggtgtgctcctgagattgcttccaagatgcattatca

SEQ ID NO: 28294 - DNA, 65 bp, Mus musculus
aaaagtcttgccagtatggactcacgctcagcatcccatcgctccaccagatttgcggcaacttt

SEQ ID NO: 28295 - DNA, 65 bp, Mus musculus
acaaataagacggttagcacattggtggtggctgactctcagacccctggaatctacagctgccg

SEQ ID NO: 28296 - DNA, 65 bp, Mus musculus
tggatggtgagggactggacttcaactttgagccagatccctgagtcacagcaagaagctttgtc

SEQ ID NO: 28297 - DNA, 65 bp, Mus musculus
ggaaatggagagtgtgtttctggaacttgccattgtttccccgggtttctaggtccggattgttc

SEQ ID NO: 28298 - DNA, 65 bp, Mus musculus
caggagacaacactaactagggagctagttgacgggaaactcatcctgactctcactcatggcag

SEQ ID NO: 28299 - DNA, 65 bp, Mus musculus
taccacgtgcttgccatgtaagccaaacaaagtctttctgagtcctctcaggcagctctgctgca

SEQ ID NO: 28300 - DNA, 65 bp, Mus musculus
cacactgcctccagcttgcacgtactctttctttaatcctcaccatcaaaaacaagttggcatct

SEQ ID NO: 28301 - DNA, 65 bp, Mus musculus
cggtgctaacagcctgttcttggagaaatcgccctttgtggaaggcctcagctacaacctgaata

SEQ ID NO: 28302 - DNA, 65 bp, Mus musculus
gcctacaacaaagctgtgaattgttccagatggttcttgtgttttgtccgcacacaggtgcctgc

SEQ ID NO: 28303 - DNA, 65 bp, Mus musculus
acacgctgagggagacaagcctgagaatctggaactcagtgcccaggggcatattcactgtatga

SEQ ID NO: 28304 - DNA, 65 bp, Mus musculus
gccctccatgaaataccactgaaaaaaggtgaaggtgctcagttataacctgcgaatccatgagc

SEQ ID NO: 28305 - DNA, 65 bp, Mus musculus
gagtgaagtcgaagggtggtttcagtttctcccagaccttatacccaatttgtcacagcagtccc

SEQ ID NO: 28306 - DNA, 65 bp, Mus musculus
tcagaaaagagtgatggccctgctaaggcgcattgagcaccctactgcaggaaacattgaggcct

SEQ ID NO: 28307 - DNA, 65 bp, Mus musculus
ggaacgaacccaagtacaaggtggtccaggacacataccagatcatgaaggtagaaggacatgtc

SEQ ID NO: 28308 - DNA, 65 bp, Mus musculus
gtctgggctgcaccgcccgtcttaacccattctcgacttaactactctcgtcgaacaagcatgga

SEQ ID NO: 28309 - DNA, 65 bp, Mus musculus
aaaacctggatggacttggacgggacaagaggcctggactgagatgtgagtcccatggaagactt

SEQ ID NO: 28310 - DNA, 65 bp, Mus musculus
atgaggagcgagtgctgccgtccattgttaatgaggtgctcaagagtgtggtggccaagttcaat

SEQ ID NO: 28311 - DNA, 65 bp, Mus musculus
tagacggtttgcagatatccaactgcagcacggagctctgtgcttcaacatccggtatggaacga

SEQ ID NO: 28312 - DNA, 65 bp, Mus musculus
atggggtcaacgtcactgtgtcccagatcaacaccatgctcagtggcaggactagacgctacact

SEQ ID NO: 28313 - DNA, 65 bp, Mus musculus
cccaacacaggcaagggtttgttttctagacttacccgtcagcaatgaaagtttcccacatttac

SEQ ID NO: 28314 - DNA, 65 bp, Mus musculus
tctcaaagcgtcagggagaaacaagcacttcaaggtgcagctggtggacagcgtctactgcattg

SEQ ID NO: 28315 - DNA, 65 bp, Mus musculus
actgttcagtggtcagacagcaccaggagagcctggagaagaggccttgtcttccctaaagcaaa

SEQ ID NO: 28316 - DNA, 65 bp, Mus musculus
ttttgagttcaaatgctactgtctaagcgcaaagtccctcatcctgaagtagactagagcccggc

SEQ ID NO: 28317 - DNA, 65 bp, Mus musculus
ggctctgcaccagaagtcaacttcacattcgaaggagaaatcggcaagaacccagatgaggaaga

SEQ ID NO: 28318 - DNA, 65 bp, Mus musculus
aggagtgtcagagcaggccaaccgagcaatcggcaccatcggattggtggcagctggtattgata

SEQ ID NO: 28319 - DNA, 65 bp, Mus musculus
acaatgagaatcgagagaacgcgtcgaataatcacgaccatgatgacatcacctcaggaacgccc

SEQ ID NO: 28320 - DNA, 65 bp, Mus musculus
cccgtgtaccagatttcagaactgatattcccacctcttccaatgtggcaccctttgcccagaaa

SEQ ID NO: 28321 - DNA, 65 bp, Mus musculus
aatagtggccgtagcagcaaggtagctcgcacttctccgatcaacctgggcctgactgtaaatgt

SEQ ID NO: 28322 - DNA, 65 bp, Mus musculus
cagacctcacgtggtaggcagtggaggcactgacaaggacaaggaggagtttcgggaggccaagc

SEQ ID NO: 28323 - DNA, 65 bp, Mus musculus
caagctagaagagacgttgcctgtcatccgatctgttagcgaacagttcaaggaccctgaacaga

SEQ ID NO: 28324 - DNA, 65 bp, Mus musculus; identical to SEQ ID NO: 23716

SEQ ID NO: 28325 - DNA, 65 bp, Mus musculus
gttctacaggagccccgaggtgctgctgggcatgccctacgacctggccatcgacatctggagca

SEQ ID NO: 28326 - DNA, 65 bp, Mus musculus
gaagccctacagtcaggtgcagcattcagagaccgcagaaagcgaattccaagaaatccaggtaa

SEQ ID NO: 28327 - DNA, 65 bp, Mus musculus
aaagatggttctttggtgtcgctgtctctcacctcacacacaggctgggtgacatcagtgaagtg

SEQ ID NO: 28328 - DNA, 65 bp, Mus musculus
tctgcccaccctcatgtcagtgatgttagcaaaaccgcgacttgacacagagcagttagcgccac

SEQ ID NO: 28329 - DNA, 65 bp, Mus musculus
aaattgcaaggaggctccatcctagcacacatccagaagcggaagcacttcaatgagcgagaagc

SEQ ID NO: 28330 - DNA, 65 bp, Mus musculus
ttctcaggacacagcgctacacttctgctctgaggaaggaggtgttcccgacaactgcacataat

SEQ ID NO: 28331 - DNA, 65 bp, Mus musculus
gtatgccgagcacaaaacgcctgtctgtgtgtggggctgtgttgtgagctttgaatgtgaaagaa

SEQ ID NO: 28332 - DNA, 65 bp, Mus musculus
ctgaggtccaaggaagcaccaagtctgcatacaaccagaaagtggatctcttcagcctgggaatt

SEQ ID NO: 28333 - DNA, 65 bp, Mus musculus
gaaaatgcagatgatccacaggctaaatgggaaacctggagagtagatgagaggcactgaagtgg

SEQ ID NO: 28334 - DNA, 65 bp, Mus musculus
ctctgccatcatcctcgcagctattggcatcggcatcgttatcacagtgcacctttggaaacgat

SEQ ID NO: 28335 - DNA, 65 bp, Mus musculus
tggtctgttggatgtgttcacacccgcaaggtcactggaggaattcaatgacgtgtacctggtga

SEQ ID NO: 28336 - DNA, 65 bp, Mus musculus
catctacctcaaaagtgactgctggggactcctagagtgactgacctggatgtgcctgtaaaatg

SEQ ID NO: 28337 - DNA, 65 bp, Mus musculus
gtgggcagaggtggccattggagattgttgtactctgaggagtcagattcgatagccttttgttg

SEQ ID NO: 28338 - DNA, 65 bp, Mus musculus
gaccacgtccagtatacgctggttccggtttctgggtggcaagaacttgaaactgcatatcttga

SEQ ID NO: 28339 - DNA, 65 bp, Mus musculus
aaagaaccagaaggatcctggtgtccttgaccgcatgatgaagaagctggacctcaactgtgacg

SEQ ID NO: 28340 - DNA, 65 bp, Mus musculus
gtgccatattttctgttctccaatgatacctggagaaatccgtgttacagcctatagctgtgagg

SEQ ID NO: 28341 - DNA, 65 bp, Mus musculus
aataaactccacaaggaggtgtccagcgttcgtgtagcccacagtgagagagtggccaagctcgt

SEQ ID NO: 28342 - DNA, 65 bp, Mus musculus
gacccagagcaggtttgctttcggcactgacagacaaagccagtgtaggtttgtagctttcagtt

SEQ ID NO: 28343 - DNA, 65 bp, Mus musculus
tggtgggttcattgactgtcgctgctgtcccttgtcaagtatgagtctgctccgcagtgtgattt

SEQ ID NO: 28344 - DNA, 65 bp, Mus musculus
ccagctgtaagacaccttcggcagagcaaagtcacatcacccgtctcctgagagacaccttctct

SEQ ID NO: 28345 - DNA, 65 bp, Mus musculus
acctcagctgccgagttctgcttggccctcttttgcccatacaccttggtctcccaagaaggtct

SEQ ID NO: 28346 - DNA, 65 bp, Mus musculus
cttcttccttgggtacatatcgttatggagactcctcttgagaaggcactgaccaccatggtcac

SEQ ID NO: 28347 - DNA, 65 bp, Mus musculus
ccagggactttgactgcgcttcggatgtgttaccaaggttatggtcacccactgatgctatttct

SEQ ID NO: 28348 - DNA, 65 bp, Mus musculus
agacagagatgggcaagaagactttgagcaacctggagaagatctgtgaggactaccgagccctt

SEQ ID NO: 28349 - DNA, 65 bp, Mus musculus
tagtcgaatccaggaccgaggagaccaggcattcacagaaagagaggcgtcagagatcatgaaga

SEQ ID NO: 28350 - DNA, 65 bp, Mus musculus
aacggaagtctagcagatgcttcatgccttgtgttccgacagaacggagatgccatgctcgtctg

SEQ ID NO: 28351 - DNA, 65 bp, Mus musculus
aaaagttgtctacagcttgcctcgggttggagtggggaccagctatggtttgccacaagccagga

SEQ ID NO: 28352 - DNA, 65 bp, Mus musculus
agaaagtctgtttgtgtgtcaagtttctgtggccttttcttggcagctatggccgcattatgact

SEQ ID NO: 28353 - DNA, 65 bp, Mus musculus
tggagcaggccacacagttcagtgccttcctgttgcccatgatggagtacatccctgagaagcgg

SEQ ID NO: 28354 - DNA, 65 bp, Mus musculus
ggcagtgccagccttctcgcgctgtctagtgctctgagtgggcagtctcacttggcaataaaaga

SEQ ID NO: 28355 - DNA, 65 bp, Mus musculus
gtagaggtctctctcactgacctcacactgtccgttagttggttggctgtccgtttcactatcac

SEQ ID NO: 28356 - DNA, 65 bp, Mus musculus
ggcacatgatgatcccaatgtgacccaaggccactgtctccagccttactgggttacttgtcaac

SEQ ID NO: 28357 - DNA, 65 bp, Mus musculus
cgtcctgggtgttgaatgttgcgttctgtcctgatgacactcactttgtctccagttcatctgac

SEQ ID NO: 28358 - DNA, 65 bp, Mus musculus
cagggccttattttggcgagtaaaaccaactgggcagaggaccctgccctcagagagacagtgct

SEQ ID NO: 28359 - DNA, 65 bp, Mus musculus
gataaagatctgtctggttcagaagaagatgttgctgatgaaaaggctccagtaattgataaaca

SEQ ID NO: 28360 - DNA, 65 bp, Mus musculus
atgatgtccagttcggccagtttggagatgacccaaaggaagaagtcatggtgttggagaggatc

SEQ ID NO: 28361 - DNA, 65 bp, Mus musculus
cagatagttcagaaactgctgatctcttgagcctggtttcagaggaagatgtatcaaacagactt

SEQ ID NO: 28362 - DNA, 65 bp, Mus musculus
aaggatggagtctatcatgtcagaggcagacccatttggagatgggaggttgtaggtggcacaca

SEQ ID NO: 28363 - DNA, 65 bp, Mus musculus
ggtgtccagcatggctgtacatccagcaggtgacaacatcatctgtggcagctatgacagcaaac

SEQ ID NO: 28364 - DNA, 65 bp, Mus musculus
agtgcttgtgtctggagctgacaatggcaccatgcacctttgggactggagaactggctataatt

SEQ ID NO: 28365 - DNA, 65 bp, Mus musculus
accaccgaacagaagctcaatagccccagtagcagaggtggcatcaaaccgattccaaagcattc

SEQ ID NO: 28366 - DNA, 65 bp, Mus musculus
tggggactagactatctagcctgaagagtccatgaggcaggccctcagtcattttggagcacagg

SEQ ID NO: 28367 - DNA, 65 bp, Mus musculus
catggtctgcggagatattccgtttgagcacgatgaagagatcatcaagggccaagtgttcttca

SEQ ID NO: 28368 - DNA, 65 bp, Mus musculus
atcaccctcaccagctcctatccagcaccctttgccatgatgagccaccacgagatgaatggctc

SEQ ID NO: 28369 - DNA, 65 bp, Mus musculus
agctgaggtcacctaggcagtgaagagtgcttgttctgtgtgtgtatagactactaccgactgtc

SEQ ID NO: 28370 - DNA, 65 bp, Mus musculus
caatgcctgctgtcatcactgtcactgctaacaggctctttgccgtgaacaagtggcacaacctt

SEQ ID NO: 28371 - DNA, 65 bp, Mus musculus
ttgatcagagcatccgatggatgggagagtcacagatggtcaggagagacttggaggatcttgga

SEQ ID NO: 28372 - DNA, 65 bp, Mus musculus
ggatgctcacaactgtattcctgagctggacaatgagacagccatgttttctgtctacgatggac

SEQ ID NO: 28373 - DNA, 65 bp, Mus musculus
atatagactcctcagtccctgcagcaggtagaccaaggagcatagtaactattgggcagctttgg

SEQ ID NO: 28374 - DNA, 65 bp, Mus musculus
ttggatgacatcattcggcatgacttcttcctgcagggtttcactccggacagactctcttccag

SEQ ID NO: 28375 - DNA, 65 bp, Mus musculus
ggtacatgcccagtgcatggatttggaagaacgcacactcatccacttgtcagaaggaagcaaca

SEQ ID NO: 28376 - DNA, 65 bp, Mus musculus
ggaaggagtgtactgccaaaagggaactctttctgaagactaatgctcagttgaccatccgctgc

SEQ ID NO: 28377 - DNA, 65 bp, Mus musculus
agccacccacagcccagagctcagatggaaagtgtgcaggagctgatccctctggccaaggagat

SEQ ID NO: 28378 - DNA, 65 bp, Mus musculus
gccttccgtcacctttacggagagagctcagtggccccatagatcacagctactttgacaagtat

SEQ ID NO: 28379 - DNA, 65 bp, Mus musculus
tgcccagacctaactgcccgaggcctgtagactgttctagccgaactactatgcaatacgagttc

SEQ ID NO: 28380 - DNA, 65 bp, Mus musculus
atagagagactgggctatgatccagacgccaaggctgcctttcagcccaaggccaagcagaaggg

SEQ ID NO: 28381 - DNA, 65 bp, Mus musculus
agagagtatggtggccatcagaaagctgtcgtctgcttggccttcaatgacagtgtgctgggtta

SEQ ID NO: 28382 - DNA, 65 bp, Mus musculus
agatgctgcgactcaacgccgacccccacttcttcacgcaagtctttcaagacctcaagaacgag

SEQ ID NO: 28383 - DNA, 65 bp, Mus musculus
cgctgtgaccccatagacttttccaatagccctgaagcacttcggatggttcgagtggcctggct

SEQ ID NO: 28384 - DNA, 65 bp, Mus musculus
gatggcacaatcagtgaggacactatccgtgcatctctcatctcagcagtcagtgacaaactgag

SEQ ID NO: 28385 - DNA, 65 bp, Mus musculus
tagccctgcatctctaggtccatagcggagcaggctttcggtgctgtgctgtacagatgcctgta

SEQ ID NO: 28386 - DNA, 65 bp, Mus musculus
agatgaagaccttggatgtgaatcaggactcagagctgaggttcagtgaatactggagactgatt

SEQ ID NO: 28387 - DNA, 65 bp, Mus musculus
aggagtggaaggagcttacttaccaagaagtccttagcttcaagcccctggaaccctcacagctc

SEQ ID NO: 28388 - DNA, 65 bp, Mus musculus
ttgcgatgcgctcatggcgggctgtctccaggaggcccgagaacggtggaactttgacttcgtca

SEQ ID NO: 28389 - DNA, 65 bp, Mus musculus
agctgactggtcccaggaactgttggtaagggtcacttaggggatgagatcaacgctctgttgat

SEQ ID NO: 28390 - DNA, 65 bp, Mus musculus
gtggtttcaacttcctaaatcatggtgacttcattcagagccatttgttgtcatccattaagcag

SEQ ID NO: 28391 - DNA, 65 bp, Mus musculus
gggaacgccaagcacaacgtgcatgtcatgaacatctccacaggcaagaaagtgaagggtggctc

SEQ ID NO: 28392 - DNA, 65 bp, Mus musculus
cttcaagcagagttggagtgccttcattcgagtatgcccacttgtaacacactcttctgagtggg

SEQ ID NO: 28393 - DNA, 65 bp, Mus musculus
tgctacagacttggtactccagtttccacggctaatcactgctcgctcagggtcctgaagatagc

SEQ ID NO: 28394 - DNA, 65 bp, Mus musculus
ggagatttcagtgactcttccagcagctctgaggaaacaaaccaagaatcatagtgccagactgc

SEQ ID NO: 28395 - DNA, 65 bp, Mus musculus
tgtctggtctttggaggaaagcaacaggcttgcctcctgagggagagatagtcctcacgtttaaa

SEQ ID NO: 28396 - DNA, 65 bp, Mus musculus
aggtcaccctagtgtttgagcatatagaccaggacctgaggacatacctggacaaagcacctcca

SEQ ID NO: 28397 - DNA, 65 bp, Mus musculus
ttttagttgcagcgaacaatggacagtttcactgctgaaataaatgatccaaaggcaaataatgg

SEQ ID NO: 28398 - DNA, 65 bp, Mus musculus
aaggttacaggatcagacgctggtcagctctacgccatgaaggtcctgaagaaagccaccttgaa

SEQ ID NO: 28399 - DNA, 65 bp, Mus musculus
tctggctatgcagaagcagtctgagggccttaccaaagaatatgaccgcctgctagaagaacatg

SEQ ID NO: 28400 - DNA, 65 bp, Mus musculus
ctcccatcaagactacctcatagtccagtagatccactccgtgaccaaggacatcatgctctgta

SEQ ID NO: 28401 - DNA, 65 bp, Mus musculus
tttcacacaagtgttctctgacttgaagaatgagagcggtcaggaggacaagaagcgactcctcc

SEQ ID NO: 28402 - DNA, 65 bp, Mus musculus
cgcgggaagagccaatacttacacttgtggatgaagcaatcattaagcagatcaaccaggaagaa

SEQ ID NO: 28403 - DNA, 65 bp, Mus musculus
tcaagatcgccgactttggcctgtctaacgtcatgcgcgatggccacttcctcaagacctcctgc

SEQ ID NO: 28404 - DNA, 65 bp, Mus musculus
aagggtgtcaggagaacgagcattcggctcggcacagaagatcactagaggatgccggatgctat

SEQ ID NO: 28405 - DNA, 65 bp, Mus musculus
ccccgcgcaaacgtctgagatgagttagtttagaggctaacggccagagagaacttgctgggcat

SEQ ID NO: 28406 - DNA, 65 bp, Mus musculus
gaagaactcagccatcagaccgagtgcctttgagcacacacagatgaagctcttcaggtctcaaa

SEQ ID NO: 28407 - DNA, 65 bp, Mus musculus
tattcagatcctgaccatcactataccctgggattggctatgggaaagcatgcctcagccactca

SEQ ID NO: 28408 - DNA, 65 bp, Mus musculus
ccaagcctgggacttgagccatcgtaactcactaacagggagaattagctagtagcaatgtgcct

SEQ ID NO: 28409 - DNA, 65 bp, Mus musculus
tcatggtgtagggtctctccaacatttggctgaacttgaagggcaaagaccaaggggaggtcaag

SEQ ID NO: 28410 - DNA, 65 bp, Mus musculus
tctaacgcctttcaccattaagaggaaagcgatggaggagctgagcgctgacgagattcgacgga

SEQ ID NO: 28411 - DNA, 65 bp, Mus musculus
aaaacaagctgtgacaagcagaaaccatgtctaggggtgtgcagcccttgacccaaagcttaagc

SEQ ID NO: 28412 - DNA, 65 bp, Mus musculus
ctcttagagaagagtcttggtccagcattcactcccaacccataaccattgcccatcaggaattc

SEQ ID NO: 28413 - DNA, 65 bp, Mus musculus
agggatgggtccactatatgatccatgaaccagaacctcacatcttactgttccgacggccactg

SEQ ID NO: 28414 - DNA, 65 bp, Mus musculus
gcatgcacctgtgtgaaagcagaacagggaatggagttgataagtgctgatttagctcatctcac

SEQ ID NO: 28415 - DNA, 65 bp, Mus musculus
agacaggtgtcaagactggtcggaagccttgcactggtacaacacagccctggagacaacagact

SEQ ID NO: 28416 - DNA, 65 bp, Mus musculus
atgaaggactttacaagcctgtgtcttcacctgactgtggagtgtgtagaccggtacctgcgaag

SEQ ID NO: 28417 - DNA, 65 bp, Mus musculus
ccaaacgaaatctctgattgcccaaaatatccaagaggctacaagtggctgcttcaccacagctc

SEQ ID NO: 28418 - DNA, 65 bp, Mus musculus
ttaaacatcgggtttggagtctggactaagctccatccacgtcactcacaagtttctgtttctat

SEQ ID NO: 28419 - DNA, 65 bp, Mus musculus
agtgccccagatgaccctggaagaacatctaagctttctgtccaagacccctacccaacatggga

SEQ ID NO: 28420 - DNA, 65 bp, Mus musculus; identical to SEQ ID NO: 23716

SEQ ID NO: 28421 - DNA, 65 bp, Mus musculus
accactcctttggcgcttcgctgtcgaccgtgcgcttcttctagcccagtgatcagtcatggcat

SEQ ID NO: 28422 - DNA, 65 bp, Mus musculus
tgctgttcagtgatggcactgtccaggtgaacttctacggggaccacacgaagctgatcctcagt

SEQ ID NO: 28423 - DNA, 65 bp, Mus musculus
tgtgccattcgaaaagcgctacacaacagatgccacaaagcaatccctatgctgtccctcccact

SEQ ID NO: 28424 - DNA, 65 bp, Mus musculus
gctctggatttactggataaaatgttgacatttaaccctcacaagaggattgaagttgaacaggc

SEQ ID NO: 28425 - DNA, 65 bp, Mus musculus
cccaagggctgacacaccatgcagagctacgaaatctgtgctgagaaaatgccatctggaaagat

SEQ ID NO: 28426 - DNA, 65 bp, Mus musculus
ttcaccttcgacatggagctggatgacctccccaaggagcggctgaaggagttgatcttccagga

SEQ ID NO: 28427 - DNA, 65 bp, Mus musculus
acgcctgtgccgtctgataccactgtgccccagagaccagtgccagagggaaatcctgctccagc

SEQ ID NO: 28428 - DNA, 65 bp, Mus musculus
ccaacgaacccaaagctgccacctcatgtctcagactatactcgggacttcctcaaacggatttt

SEQ ID NO: 28429 - DNA, 65 bp, Mus musculus
tccacttgtcatcaacctcattcccttcttgttcctcccacaaaggaggatgccagtaggggcta

SEQ ID NO: 28430 - DNA, 65 bp, Mus musculus
gccacctgacagcaggccactagtgacagtttctgttatgttcctatggaaacactgtactgtac

SEQ ID NO: 28431 - DNA, 65 bp, Mus musculus
atgtaaatgcctgttttctttaggatataaagagagccttagagtgcgtgagtctctacatgtaa

SEQ ID NO: 28432 - DNA, 65 bp, Mus musculus
aagctaagtaccagtatggtgggctgaattctggacgtcctgtcactccgcctcgaacagctaat

SEQ ID NO: 28433 - DNA, 65 bp, Mus musculus
cctggacctgcgacgtgagatcattgatgtgggtgggatccagaacctcattgaactgaggaaaa

SEQ ID NO: 28434 - DNA, 65 bp, Mus musculus
agggtccgtgtttgctgccttaaccctgtctcctctatgttacccagaggtcctggtctcagaca

SEQ ID NO: 28435 - DNA, 65 bp, Mus musculus
cagaggcactgaagcagtctccgtttacacggctcttcactgagtgttggaagtgctgagtgtaa

SEQ ID NO: 28436 - DNA, 65 bp, Mus musculus
aacaagatcaagacccgctttctggaccaccctgagatctacaggtccttcctggagatcctaca

SEQ ID NO: 28437 - DNA, 65 bp, Mus musculus
ccagaagagactgtgcaccattaacactgtccaagccttaatcaagagagatggaagtcagaggc

SEQ ID NO: 28438 - DNA, 65 bp, Mus musculus
ccagtgggggatcttccctgttggctgtgagcatagtgccttactctggcttcttcgcacatgtg

SEQ ID NO: 28439 - DNA, 65 bp, Mus musculus
acgctagtggatgttctttactacgtcacacgtgatgatctgaagtgcctcagactaaggggcgg

SEQ ID NO: 28440 - DNA, 65 bp, Mus musculus
ttctcgtctcatggcattgctgggacaggcattgaagtggcagcagcaccagggattgcttcctc

SEQ ID NO: 28441 - DNA, 65 bp, Mus musculus
agttatcacaagctggtggcaagctacaaaagacctgactcattcccagatggacaggacatgtc

SEQ ID NO: 28442 - DNA, 65 bp, Mus musculus
gatccgcagagatcactttgaggaagccatgcgttttgcccgacgttctgtgagcgataatgaca

SEQ ID NO: 28443 - DNA, 65 bp, Mus musculus
cagctggaaatgcagctcgagaagcccagatccatgaagccagtgacgttttccacaggaattaa

SEQ ID NO: 28444 - DNA, 65 bp, Mus musculus
tgccttagccatgtgattcacggcctgatgctgttcgctagggtacctcaaacacgtgacatagg

SEQ ID NO: 28445 - DNA, 65 bp, Mus musculus
gcgggagtaaggaaatgcaggagttgaccggatccttgttcctcaccttgtacactcacttaaac

SEQ ID NO: 28446 - DNA, 65 bp, Mus musculus
aacagagccctgtggaagctggggaagacaatcagcccggaagctttgctcactcagcaagacaa

SEQ ID NO: 28447 - DNA, 65 bp, Mus musculus
tggattattctcgctgtggtcacgaggccgttcctatagcgctctagttggcccagactgagaac

SEQ ID NO: 28448 - DNA, 65 bp, Mus musculus
agccctacccaatgtacccagctacaacatccttggtgaacgtcgtgcccaagctcaatgccacg

SEQ ID NO: 28449 - DNA, 65 bp, Mus musculus
agtgaggctgcggctcaccattgtggacactccaggatttggggatgcagtcaacaacacagagt

SEQ ID NO: 28450 - DNA, 65 bp, Mus musculus
actcatggaccaatcggtgagagaaggtcaagatgtcattatgagcatccgtgtgcagggagagc

SEQ ID NO: 28451 - DNA, 65 bp, Mus musculus
ggggctggggaataagagttcagaaggtaatatgcttccatgaaagtgtaaagattgccgggcag

SEQ ID NO: 28452 - DNA, 65 bp, Mus musculus
cagccaacctccaggtttcagtgggacctctcagacaaagaaacagccttggtataacagcacat

SEQ ID NO: 28453 - DNA, 65 bp, Mus musculus
atgagtgttctggataccaacaaagactgcgaagtggactttggggagtacgtgcgctcacttgc

SEQ ID NO: 28454 - DNA, 65 bp, Mus musculus
ggtccagacagagcatccacgaacaagaccataacaaggaaaggtgaaccagctaactcccaaga

SEQ ID NO: 28455 - DNA, 65 bp, Mus musculus
aattgggcagacaatgtatggtactggttcaggtgtcaccaaacaggaggcaaagcagttggctg

SEQ ID NO: 28456 - DNA, 65 bp, Mus musculus
cctcaagaagtacctggactccatccctcctgggcagttcatggattcttcactcgttaagagtt

SEQ ID NO: 28457 - DNA, 65 bp, Mus musculus
gggatgacatcaatgagttcagaagtatgccagctttgtctcgaggccttgacaccattagctga

SEQ ID NO: 28458 - DNA, 65 bp, Mus musculus
ttgtaccacgcctagtccaagacaagtgcccagtgaatgtctagcaaactcgtgagtgaacgagt

SEQ ID NO: 28459 - DNA, 65 bp, Mus musculus
tagcatcccagaaggtatctcctgcgtgtatcctgcatgttgaacaaggaggggaactgaccatg

SEQ ID NO: 28460 - DNA, 65 bp, Mus musculus
accaggtcatggtgtctgagggcatcgtcttccttatctgaagttgttgctaccaagtactgccc

SEQ ID NO: 28461 - DNA, 65 bp, Mus musculus
caagccctcactggaggaggtcctgcagtggcgccagtccctggacaagcttctccagaacagct

SEQ ID NO: 28462 - DNA, 65 bp, Mus musculus
tcaagaggagtaacgcagcaggaaaccttgggagctacaccacttacaaccagacgggatacatg

SEQ ID NO: 28463 - DNA, 65 bp, Mus musculus
aaggacctacctttgccccatggagtgtgtagaagcttgtccccgaggtcatcagaaaagaacct

SEQ ID NO: 28464 - DNA, 65 bp, Mus musculus
gaatgaactggaccacatcatggaaatcatcctgggatcctaaagctgatgggattcttccgggc

SEQ ID NO: 28465 - DNA, 65 bp, Mus musculus
cgggatatggaagaagcgagtcagcgcaagtggaatttcgactttcagaatcataagcccctgga

SEQ ID NO: 28466 - DNA, 65 bp, Mus musculus
aaagtcggtgctcttccacaccgtgcgcttcggtgcgctgtcctgctggctggacgactccagca

SEQ ID NO: 28467 - DNA, 65 bp, Mus musculus
ccaccttacactgctgggtggtcacaactgctcaccatgtgaacatagtacctcagttctgtcct

SEQ ID NO: 28468 - DNA, 65 bp, Mus musculus
tactggatatggagtcccggaaagagctatgatgggagagcttacgtcatcacgggcatgtggaa

SEQ ID NO: 28469 - DNA, 65 bp, Mus musculus
tcactcccaaggatagtggatggaagccaacaatttaagctatagcagttgtttctgtttgttac

SEQ ID NO: 28470 - DNA, 65 bp, Mus musculus
cccacctcactccctttgtgtcaagacatttcccttatcctgctgttcttcgggtgctacttcgt

SEQ ID NO: 28471 - DNA, 65 bp, Mus musculus
gggaagacgactttgaggaactccagtatttccccaacttctatgcactactgacaagcatcgac

SEQ ID NO: 28472 - DNA, 65 bp, Mus musculus
gctaataggtgcatacagagtacagctgcagtgaccacaaaggatggagaaccggcctcttttca

SEQ ID NO: 28473 - DNA, 65 bp, Mus musculus
atcatcactactgtgagcagcagcctgcctgaattctcagagctgcaggactgtttccgggagga

SEQ ID NO: 28474 - DNA, 65 bp, Mus musculus
tgcctagaaggtgtgtccactattttcccagtggtctgtgaaaggcaagccagctcctgaactcc

SEQ ID NO: 28475 - DNA, 65 bp, Mus musculus
aagctttcaccgggaacatcctcgctgctggtctgccctgaatggctcttactcatggcacttgc

SEQ ID NO: 28476 - DNA, 65 bp, Mus musculus
ttggtagagcacctggtccatacagattgtctcagggaagccttgaaaaccacaaaggtggagcc

SEQ ID NO: 28477 - DNA, 65 bp, Mus musculus
tgtttgctacatcccagtctggacactactcaaaatacccacaggtagtagccataggcagggca

SEQ ID NO: 28478 - DNA, 65 bp, Mus musculus
tcacagccctccatgtgcttccgggattgctggtgacagcttcgaaggacagagatgttaagctg

SEQ ID NO: 28479 - DNA, 65 bp, Mus musculus
cacaaaattccacctgctcacaggttggctggctcgacccaggtggtgtcccctgctctgagcca

SEQ ID NO: 28480 - DNA, 65 bp, Mus musculus
tctcctgcttctattggatgagattctggagcatgtaacagataggacgtgtctgagagccttgg

SEQ ID NO: 28481 - DNA, 65 bp, Mus musculus
ttaaaagggaccgagagacacatagagatagagaccgagatcgtgttcttgactatgagcgggac

SEQ ID NO: 28482 - DNA, 65 bp, Mus musculus
gcctgaagatagcttcatgagtgtctatccgatgcaggcagaacaccatcaaacgcctctggatt

SEQ ID NO: 28483 - DNA, 65 bp, Mus musculus
tcaagaaatcgccgagagagagctgagctaaggccagacttctttgactctgcagctatcataga

SEQ ID NO: 28484 - DNA, 65 bp, Mus musculus
tgctatgagccttgtcatccttaatgcgccatcgctttatgcttttgcctgtttgcagtgatagg

SEQ ID NO: 28485 - DNA, 65 bp, Mus musculus
tcgaccatgctgtcccgcctgctcaaagaacaccaagccaagcagaacgaacgcaaggagctgca

SEQ ID NO: 28486 - DNA, 65 bp, Mus musculus
accgagctacttgaggtcagtcctgtggagacagcatgccagatccttggctgggaaatggatct

SEQ ID NO: 28487 - DNA, 65 bp, Mus musculus
gcaggaactctatcttcttgtctggatccctcatctgcccttgtgtccatcttctctcctggata

SEQ ID NO: 28488 - DNA, 65 bp, Mus musculus
cttgggcaagaagctgtccaagggtaccaagaaagacctggatgacatcagcaccaaaacaggaa

SEQ ID NO: 28489 - DNA, 65 bp, Mus musculus
actccccacgatttcatcgaacacttcctctccaaaatgccagaggcggatgagaacaagcagac

SEQ ID NO: 28490 - DNA, 65 bp, Mus musculus
ctgcagaacctgttgaccatcgaggagcgctacctcccgcagtgttcctatttcaagtgcgtgca

SEQ ID NO: 28491 - DNA, 65 bp, Mus musculus
tcttcatttcgactgttctgtagcagagtaaagcacttgaaataagactccctttcacatgtggg

SEQ ID NO: 28492 - DNA, 65 bp, Mus musculus
tagaagcttatgaggagctgccctagatggcctctgtgtaatccgtactccagctgctcttagag

SEQ ID NO: 28493 - DNA, 65 bp, Mus musculus
tgtgaccgtgggaagggtgtcatatggcttgtcgctttggatgaagttacctcagtagctagtgg

SEQ ID NO: 28494 - DNA, 65 bp, Mus musculus
ggaacggacagaagttggtcaccacagtgacagaaatcgctggataagcaaatacatgggtcctg

SEQ ID NO: 28495 - DNA, 65 bp, Mus musculus
tgttaggttgaactgatttctgtccatcggcaatctacacgggaagcgtgcgcatgtgcagcttc

SEQ ID NO: 28496 - DNA, 65 bp, Mus musculus
caaccaacttctgcagttcaaagggtccatgcttgctctggccatggttagtctggaaatggaga

SEQ ID NO: 28497 - DNA, 65 bp, Mus musculus
agagttccagccaatgattgcaacggacacagagctactacggcaacagagacgctacaattcgc

SEQ ID NO: 28498 - DNA, 65 bp, Mus musculus
atgattgtccctctcagggatgagacatggacaggtctctggaacgttatgggtaatgagcccca

SEQ ID NO: 28499 - DNA, 65 bp, Mus musculus
ctatctgcagtccccactccagcctctgatggacaatctggaatctcagacatatgaagtgtttg

SEQ ID NO: 28500 - DNA, 65 bp, Mus musculus
ggataagttctacatgctcatgaggatggtcctaagtgagtcactgaaggctgtgaaagcccggg

SEQ ID NO: 28501 - DNA, 65 bp, Mus musculus
cttcggatcactacaacgcagagtgtgagtttgtggaacggatccatgagctgggctacaataca

SEQ ID NO: 28502 - DNA, 65 bp, Mus musculus
ctaggaggtgacaattcaaaactcatccccagaggaggacttgaacgaggaaactgcgagaaacc

SEQ ID NO: 28503 - DNA, 65 bp, Mus musculus
agaaggacaaacggacagcggagaaacgaccctttaacacacccggagtacaccagcggagaaca

SEQ ID NO: 28504 - DNA, 65 bp, Mus musculus
agagagcgagaagtacatctgtatgaacaagaggggcaagctgattgggaagccgagcgggaaga

SEQ ID NO: 28505 - DNA, 65 bp, Mus musculus
agctggagaacatggaggccaatgtgaagtcacagtatgcgtatgctgcccagaatctcctgtct

SEQ ID NO: 28506 - DNA, 65 bp, Mus musculus
gactctctctcagtcttccaaagagaccaggacttcagagaagcacgagtctgttcgtggttcct

SEQ ID NO: 28507 - DNA, 65 bp, Mus musculus
cgcaggtattttgtagcacttaacaaggatggaactccaagagatggtgccaggtccaaaagacg

SEQ ID NO: 28508 - DNA, 65 bp, Mus musculus
ccttgtacaaacactcggactcggagagacagtattatgtggccctgaataaagacggctcaccc

SEQ ID NO: 28509 - DNA, 65 bp, Mus musculus
agaagactgttctgtcgcacccagtggtacctgaggattgacaaacgaggcaaagtgaaagggac

SEQ ID NO: 28510 - DNA, 65 bp, Mus musculus
agagcagaagcgtctctggtgtactgaatggaggcaaatccatgagccacaacgaatcaacgtag

SEQ ID NO: 28511 - DNA, 65 bp, Mus musculus
gggctattgtacagctcgccacatttcacagcagagtgtcgctttaaggagtgcgtctttgagaa

SEQ ID NO: 28512 - DNA, 65 bp, Mus musculus
caagccattggaagttgccatgtaccgagaaccatccttgcatgatgttggtgaaacagtcccga

SEQ ID NO: 28513 - DNA, 65 bp, Mus musculus
gactccgagaccagtagacctcggcgaacccttgctctcgaccacccacccactttcggaaccat

SEQ ID NO: 28514 - DNA, 65 bp, Mus musculus
gggacggtcacagtcctagagaaagtcccggtatccaaaggccaactgaagcagtatttctacga

SEQ ID NO: 28515 - DNA, 65 bp, Mus musculus
atataaagggtacggagaccggccagtacttggccatggacaccgaagggcttttatacggctcg

SEQ ID NO: 28516 - DNA, 65 bp, Mus musculus; identical to SEQ ID NO: 23716

SEQ ID NO: 28517 - DNA, 65 bp, Mus musculus
aactcggatccaaaacgggacctggacagaaggccatactgtttcttccaatgtctgctaagagc

SEQ ID NO: 28518 - DNA, 65 bp, Mus musculus
cagcatgaaggtacactggggaatatggaacatttcctgtgagcacagaactgaactttctctgc

SEQ ID NO: 28519 - DNA, 65 bp, Mus musculus
cccagctgagatagctagagggaatatccagactgtagtgatgacctcaaaagactcagagacac

SEQ ID NO: 28520 - DNA, 65 bp, Mus musculus
actggaactcatactgcaccacgactcacaccttcgtcaaggcgttgacaacagatgagaagcag

SEQ ID NO: 28521 - DNA, 65 bp, Mus musculus
gagttcagcctccctgaggaatgattcgccaatgattctgtgataggaccagtcagtagcttttg

SEQ ID NO: 28522 - DNA, 65 bp, Mus musculus
atggctgagtgttacacaatgctgaagctagacaaggatgccattgctgtactcgatgggatccc

SEQ ID NO: 28523 - DNA, 65 bp, Mus musculus
cacacagcgactgccacaggaacaggcgtctcttcaagtcttcctaaatctgcacagcttttgaa

SEQ ID NO: 28524 - DNA, 65 bp, Mus musculus
cacagataatgcttacaccagttcccaaatccgagaaatggagactctgattttgaaagagttga

SEQ ID NO: 28525 - DNA, 65 bp, Mus musculus
cagtattcctatcagcattcctttcaatgcctatattgcatttcctagtgtgaacaaactgtgtg

SEQ ID NO: 28526 - DNA, 65 bp, Mus musculus
aagtacaccagccacctccagaacaccactgagtgctccagaagctgctaaggagggtgctactt

SEQ ID NO: 28527 - DNA, 65 bp, Mus musculus
aatgtcgtcccagcaatatcagcagcaacgtagaaaatttgcagctgccttcctggcattgattt

SEQ ID NO: 28528 - DNA, 65 bp, Mus musculus
aggatgagtggcagtccatctcagagatcgcctccacttgcaacacaattctggagtcactgtcc

SEQ ID NO: 28529 - DNA, 65 bp, Mus musculus
acagtagccttggcagaatggcctcacggttagggaaactcctgattctaagcttgggagagcta

SEQ ID NO: 28530 - DNA, 65 bp, Mus musculus
aatgagattgtgccttgcctgagtgagctgcataaagcatgcctcagtatcccccatcgaccgca

SEQ ID NO: 28531 - DNA, 65 bp, Mus musculus
gaagcaggctttcacacatacacactcaggtggatcctgcactgactctggagaaggcatacatt

SEQ ID NO: 28532 - DNA, 65 bp, Mus musculus
tttaactggcagcacaatggcaggcaaatgtacgtggcattgaatggaaaaggagctcccaggag

SEQ ID NO: 28533 - DNA, 65 bp, Mus musculus
aaaagaagctgctgatcccaggctaaggggcgaaggactgatttccccaccaacagcactcacct

SEQ ID NO: 28534 - DNA, 65 bp, Mus musculus
aatatcacagtgtttctcttctcaacccaccagagacactaagtgtgtgagtgaaagactgccgg

SEQ ID NO: 28535 - DNA, 65 bp, Mus musculus
aaggcagacggacacgacggcaccaactgtccacacacttcctgccagtcttggtctcgtcttga

SEQ ID NO: 28536 - DNA, 65 bp, Mus musculus
cattcctgtgctcttggtgtatctatccatcggtaatgctcagtgtggagctggcgattgccttt

SEQ ID NO: 28537 - DNA, 65 bp, Mus musculus
tgatccagtcgttctgctgcgacaatgacattgacatcgtccgggtatcaggcatgcagaggctg

SEQ ID NO: 28538 - DNA, 65 bp, Mus musculus
cccgtgattaatctcccggaacggtgatggcatccgaatggaaataactgaaccaaattgcactg

SEQ ID NO: 28539 - DNA, 65 bp, Mus musculus
cgacctactaagagagtgaaactttgatcgatagtaacctgtggttttaggggatttgtgttagt

SEQ ID NO: 28540 - DNA, 65 bp, Mus musculus
gtggctggctttgaactgctgctgcagaagcaactgaaaggcaagcagatgcagaaggagatgtc

SEQ ID NO: 28541 - DNA, 65 bp, Mus musculus
ctggggtacttttggatgttgcctgtgcagccccttaggaatagcaggtaccttttacacacaga

SEQ ID NO: 28542 - DNA, 65 bp, Mus musculus
aaatggagcctgaagagttggggcagatagacctcagccaaactggctgggttttgaggagtcat

SEQ ID NO: 28543 - DNA, 65 bp, Mus musculus
gagggcctgtttgaggacatcgatacctccatgtacgacagtgaactttggttaccagcctctga

SEQ ID NO: 28544 - DNA, 65 bp, Mus musculus
agaggactaaaacggagtgggactctgcccttcccaaaccctgaatgttcagccacaccttggaa

SEQ ID NO: 28545 - DNA, 65 bp, Mus musculus
atcacagagacaggcgtgaacgatctcgctcctttgagaggtcccataaaggcaagcaccatggt

SEQ ID NO: 28546 - DNA, 65 bp, Mus musculus
agcaaaggcacacgtccccattggcgtggcttggtgctattgacaagctgtctcttcactcctaa

SEQ ID NO: 28547 - DNA, 65 bp, Mus musculus
ttttcaccaagatcaagaccgctgaccaccagtacatggagggcttcaagtatgaactggaagcc

SEQ ID NO: 28548 - DNA, 65 bp, Mus musculus
gtgcaaagctgtggctaacgggaaggttcttccaaatgatccagtgtttctggagcctcatgaag

SEQ ID NO: 28549 - DNA, 65 bp, Mus musculus
gttgctcaggaaaccccagagatgttgcctgcctacatagcaatggatcaggctctaagaagtct

SEQ ID NO: 28550 - DNA, 65 bp, Mus musculus
caagtgagcaatgcctacctgtaccgcaagaggatccagccatgagcactcaccagttattacga

SEQ ID NO: 28551 - DNA, 65 bp, Mus musculus
aacatgcgtgtatgagggtggtaatggagcagggtacacatggtgtaagcatgactgggctggat

SEQ ID NO: 28552 - DNA, 65 bp, Mus musculus
gagatcatttcagatgatgacaagtcgagttcgtctttcatatcgtaccccaccacaggcgttgg

SEQ ID NO: 28553 - DNA, 65 bp, Mus musculus
atcttcattcgccaagtgacagacgcagaaacaaagcccaagtccacgtaatctggggaaagcag

SEQ ID NO: 28554 - DNA, 65 bp, Mus musculus
ttactgttggtctctgtgagtcgcatctctattacggtttacacaaaactcccagttgcagatgt

SEQ ID NO: 28555 - DNA, 65 bp, Mus musculus
tcaggagctggcctcagtgtgactcatggaaatgtttgcttagcggatgaaagtgaggacacacc

SEQ ID NO: 28556 - DNA, 65 bp, Mus musculus
gatctctacggccttgctgacgaggactgcgacgacctggagcctctgtgacgccctactgtgcg

SEQ ID NO: 28557 - DNA, 65 bp, Mus musculus
acatcacagcatatcgtacacgttgtcacggagccagacggtagtggtggagtacacacacgata

SEQ ID NO: 28558 - DNA, 65 bp, Mus musculus
ctaagcaatctcttttgatgcctctgcaccataatgtgtgaaagattgaccgcaacctactgccc

SEQ ID NO: 28559 - DNA, 65 bp, Mus musculus
gaagctaggattaatgaggaaatagagcgggtgatgcactgccttgacaaatccacagaagagcc

SEQ ID NO: 28560 - DNA, 65 bp, Mus musculus
gtttattcgcttgaagaacacttctgagcaggatcaaccaatgggaggctgggagatgatcagaa

SEQ ID NO: 28561 - DNA, 65 bp, Mus musculus
taagtccactcttcctcaaaactagcaccagtcacacatacctggtcctctgagtcaccgtctgg

SEQ ID NO: 28562 - DNA, 65 bp, Mus musculus
cgaagaaggactgcatgaggcgatacaaggaacttgtggagatggtgaaagccaagaaagctgct

SEQ ID NO: 28563 - DNA, 65 bp, Mus musculus
tggaacaggctgatgaagacttagctaccggcttggcattgattgacctgggtcagagtatagat

SEQ ID NO: 28564 - DNA, 65 bp, Mus musculus
ttgatctgctgatttacactgacaaagacttggtggtacctgaaaagtgggaagaatcgggaccg

SEQ ID NO: 28565 - DNA, 65 bp, Mus musculus
aatggatgacgatgagggagaggttgtggagtatgtggacgacttgttggagacggaagagtctg

SEQ ID NO: 28566 - DNA, 65 bp, Mus musculus
cagctgaggaacgggcactcttcacagatcggatggccactagatccaccacccagagtaataga

SEQ ID NO: 28567 - DNA, 65 bp, Mus musculus
gactggagagagcgtagttctgtcttcaataccgctgccatctgatgactttaaaagcacaggga

SEQ ID NO: 28568 - DNA, 65 bp, Mus musculus
tatcaggaacatagtagcatgccaagtctaccatctcggggacttacaagggctaccagaccctg

SEQ ID NO: 28569 - DNA, 65 bp, Mus musculus
gcttctccagcggcatctgcattccgtggaccataaccataatcgaaggttggctgctgagcagt

SEQ ID NO: 28570 - DNA, 65 bp, Mus musculus
atgagccaggttcctagccttccttttggaagctcagttcttgagttgtcagagggcctcattgc

SEQ ID NO: 28571 - DNA, 65 bp, Mus musculus
ctgagaggggaggtcagaagcatgtaatgccattcgtttcatggctaaacacacagactccttgc

SEQ ID NO: 28572 - DNA, 65 bp, Mus musculus
gaggttccaggtctggcaattaagtctcgggttagccacaaccttggagaggccggtatccaata

SEQ ID NO: 28573 - DNA, 65 bp, Mus musculus
accatcaggatctctatctgacctcctcaaagtctgctcgcctgaagtgttgatctgtgctgatg

SEQ ID NO: 28574 - DNA, 65 bp, Mus musculus
gcccgcagtattctcaacaacaagctcattagcaagaagctggagcgatatctgaagggcgagaa

SEQ ID NO: 28575 - DNA, 65 bp, Mus musculus
aggcctattcagcgaagatggtgtcactctggatgacatccgaaagattgagcggaatcggcagc

SEQ ID NO: 28576 - DNA, 65 bp, Mus musculus
tgagttcactgctggtctgtcttctgagctgcgttctgtcctcgccatgatgctggagcctgacc

SEQ ID NO: 28577 - DNA, 65 bp, Mus musculus
ttctttccagagtatatggagctgtgtgacccacagagctactgtcccatgcttcaccaggacca

SEQ ID NO: 28578 - DNA, 65 bp, Mus musculus
atagatagtcagtgcccgatggtgaagcacacacacataggcacatgtccagagcgatgcagaac

SEQ ID NO: 28579 - DNA, 65 bp, Mus musculus
agactggagtctgcaacaccgtgttaggctgctctcactgagcatcccatgaagaaggccttatt

SEQ ID NO: 28580 - DNA, 65 bp, Mus musculus
acagttgcccacatcatccccagatccctttgccacccatagctgcatcatgtcacaaacactag

SEQ ID NO: 28581 - DNA, 65 bp, Mus musculus
ccacactcaacaagtgtacatgtgtccctgtgtccaggcaagaagctctcttctgacttacatgg

SEQ ID NO: 28582 - DNA, 65 bp, Mus musculus
cagcatgtgcatatcatgtgcccaaaacagtcgaaatatccttggtgacgttgtcgccaccttcc

SEQ ID NO: 28583 - DNA, 65 bp, Mus musculus
acatgtgactcatggctagagaatgtgtctagcatgatcggggactaagttctcaccccagcact

SEQ ID NO: 28584 - DNA, 65 bp, Mus musculus
aaagtttggtgaggtgcgttaggttggacccgcttggggaaggtgcctctacagacccagggcta

SEQ ID NO: 28585 - DNA, 65 bp, Mus musculus
gaattcccaagtattcggtgtgagtcccatgtttttgagttaaggtgctacttcgggtcagctga

SEQ ID NO: 28586 - DNA, 65 bp, Mus musculus
aatatcatcccggtcatcggtaaagcagacgccctgatgcctagggagactcaggccctcaagca

SEQ ID NO: 28587 - DNA, 65 bp, Mus musculus
tatgatcaagcagttcctccgtgatgtagactggggagacgtggactacctcatcgtagacaccc

SEQ ID NO: 28588 - DNA, 65 bp, Mus musculus
cacatgctgtgttgtgtgccttttgtgacactgtggtttaccggcacatctggtaactttacaga

SEQ ID NO: 28589 - DNA, 65 bp, Mus musculus
gctttcaggttaaaccaagacacgtcagaacgaacagccactctgcagctccagtcgccatataa

SEQ ID NO: 28590 - DNA, 65 bp, Mus musculus
ttcctgtggaacttgaagccttagctgtctacctccagaggacctactctaggaaagccaccatc

SEQ ID NO: 28591 - DNA, 65 bp, Mus musculus
cctagctgtaagcttaagtctcctttgtatccctctgttggtggggaaaggtgtctttctttctg

SEQ ID NO: 28592 - DNA, 65 bp, Mus musculus
aaagtcgccacgtgtgcccagcacaaggttcacccctagatgtgggtgagggagacccctgtgga

SEQ ID NO: 28593 - DNA, 65 bp, Mus musculus
gaggccagaaccacaaatatcgggtgccttcctttggaaacatttgacctctcttctgtgaagag

SEQ ID NO: 28594 - DNA, 65 bp, Mus musculus
agctccagcaacccctacagcactgtcaccatggatgagctgcgcaacaagtgggacaaggtgaa

SEQ ID NO: 28595 - DNA, 65 bp, Mus musculus
tattcatctgtgaacggcgactgtagactgaacatggagccaaacagcacaaggtgacggtgctg

SEQ ID NO: 28596 - DNA, 65 bp, Mus musculus
gggcgtgatggcagggattatcggaactatccttcttatctcttactgtatcagccgaatgacaa

SEQ ID NO: 28597 - DNA, 65 bp, Mus musculus
actaaacaagcagagacaagcatccgccttcagagttactgtctgcctgaggcaaagagggcaga

SEQ ID NO: 28598 - DNA, 65 bp, Mus musculus
aatgctacaatacattggtgtaatctgctcaaagaaacctgtgctagatctgcagaaaagacaaa

SEQ ID NO: 28599 - DNA, 65 bp, Mus musculus
ctgtcgtcagactacctgtccagagtgtacttacccaacaagctgaggtttggaggatggatcta

SEQ ID NO: 28600 - DNA, 65 bp, Mus musculus
ttgtcttggccttcctcatgatcttcgagaacatgacactggtagatgccatccagacggtgcag

SEQ ID NO: 28601 - DNA, 65 bp, Mus musculus
tactgtccagctgccaacaggtctgatctctctgaggggctgattagatcctggctatgcctgct

SEQ ID NO: 28602 - DNA, 65 bp, Mus musculus
tgccatggtcgaccgatggccagagacagggtacgtgaagaaacttcagcggagggacaatactt

SEQ ID NO: 28603 - DNA, 65 bp, Mus musculus
cattgaccctgacccacagactcatgttgcttggtgttgacagtggctatgtgtcattcatggag

SEQ ID NO: 28604 - DNA, 65 bp, Mus musculus
cttctatgggaactggatgtcccagatacagcacccaggatggcagcacatcatcagctttaaag

SEQ ID NO: 28605 - DNA, 65 bp, Mus musculus
catctagcaaacggatgtcccagagccagacagccaaaggggtagactttgaatcagatgaggat

SEQ ID NO: 28606 - DNA, 65 bp, Mus musculus
ctgccaattaccaggggaacaattacaggccactgctgagaggtcaagctcagatcccaaaactt

SEQ ID NO: 28607 - DNA, 65 bp, Mus musculus
ctcacacctccacagatgaccctgtatgtagtcctcagtgtgtactctctaaacgtgcatcagca

SEQ ID NO: 28608 - DNA, 65 bp, Mus musculus
agctactcctatagcagcagccatggccttggaggtggcttcagtgctggcagtggcagagccat

SEQ ID NO: 28609 - DNA, 65 bp, Mus musculus
atcctggaggaaaacctactacctttcaccattatcccaaacccactcgctgggagagaggtggc

SEQ ID NO: 28610 - DNA, 65 bp, Mus musculus
taatgaaggcacagagtctgcccaagacttcagcatcccaagcacgcaaggccatgattgagaag

SEQ ID NO: 28611 - DNA, 65 bp, Mus musculus
cgatgagaacttgacagggcgattgactcacaaagagttccgctcttgcctgagaggactcaatt

SEQ ID NO: 28612 - DNA, 65 bp, Mus musculus; identical to SEQ ID NO: 23716

SEQ ID NO: 28613 - DNA, 65 bp, Mus musculus
cccaggacacaagcacagggttagaagaagtgatggagcaactcaacaactccttccctagttca

SEQ ID NO: 28614 - DNA, 65 bp, Mus musculus
ctccctctagcttgtatgtcctgtactttgcaacccctaagcttcaaacctcttgctcaagaccc

SEQ ID NO: 28615 - DNA, 65 bp, Mus musculus
aaaggacaccaaagctgaaagatattcggcagagtctcagcccgatgtctcagaggcctgttctc

SEQ ID NO: 28616 - DNA, 65 bp, Mus musculus
ctaaacttggtcctggagagagaattcagtgtccagagcttaacttcagtcgtcaatgaggaggg

SEQ ID NO: 28617 - DNA, 65 bp, Mus musculus
aggaagtcggctagactcccgcactgaaaactgcctctctagctgtgtggatcgcttcattgaca

SEQ ID NO: 28618 - DNA, 65 bp, Mus musculus
caagatcatggagaaggtgcagctgattgaagacaggcacaagaagaacaatgagaaggcccagg

SEQ ID NO: 28619 - DNA, 65 bp, Mus musculus
cctgctcagtagtgacttttctcattgaacagggctctacactagaacatgtgtccagaatccac

SEQ ID NO: 28620 - DNA, 65 bp, Mus musculus
gtttctggccacttttcggaatgaagatgaatggcctgaccagctatctagggtttggggagatg

SEQ ID NO: 28621 - DNA, 65 bp, Mus musculus
gtttacaggcgtgttccagttcagcaggtgttctcatccccagtgtatgtactgcatccatctga

SEQ ID NO: 28622 - DNA, 65 bp, Mus musculus
agatcaggcgtcagaatggtgacgatcctttgatgacctatcgcttcccaccgaagttcacccta

SEQ ID NO: 28623 - DNA, 65 bp, Mus musculus
tgccaagaccagctgcagggctacgagaggaagaacatcgacctcacagccatcatttcagacct

SEQ ID NO: 28624 - DNA, 65 bp, Mus musculus
gctgcaagaattgctcatgaatggacccaggaatggaaagaatgccctgattatgtctctgctgg

SEQ ID NO: 28625 - DNA, 65 bp, Mus musculus
cttcaccttgaaagacacaactgtgtggatcattgtggccgttctctctgctgtcatctgtttga

SEQ ID NO: 28626 - DNA, 65 bp, Mus musculus
acagcgctattccagatgagagaactccagttgcttcaacccacagtattagcagtgcgaccacc

SEQ ID NO: 28627 - DNA, 65 bp, Mus musculus
gtttcaggcttgggttcacagccctccaacttctgatacgcgcatgctttagacagaaactgtga

SEQ ID NO: 28628 - DNA, 65 bp, Mus musculus
taatgtgggcaggtggagtgaggccacagttctttggggactcaaagtcttgaagttctagggag

SEQ ID NO: 28629 - DNA, 65 bp, Mus musculus
gacttactgtctctccccacactgccagctcccttcatttacccatgaacgagaggcatttctaa

SEQ ID NO: 28630 - DNA, 65 bp, Mus musculus
ggtcttcacacaagccctggagtgcatgcgcagtgagggttgtcggcgagaaaacacaatgaaga

SEQ ID NO: 28631 - DNA, 65 bp, Mus musculus
tgggttttaccagtgacacagaccgtgtcgaaatgaggatggctgtcatcagagaacacctcggc

SEQ ID NO: 28632 - DNA, 65 bp, Mus musculus
gttgctgtggtagcaggcgggtttctcttgcattggaaacagacacgtttgtaggcatttgcgta

SEQ ID NO: 28633 - DNA, 65 bp, Mus musculus
catctggtaacatgccgacacactcatgctcagacacaatagatgaggaaccgtgatcattacga

SEQ ID NO: 28634 - DNA, 65 bp, Mus musculus
tacacctaggcttcgcccgcgagccgcggcccaagctgcatcacagcctcagtttctccggcttc

SEQ ID NO: 28635 - DNA, 65 bp, Mus musculus
acgcatccagagagctgacattgtggagagcctgtgcagcgagtccactgccacgtcccctgtgt

SEQ ID NO: 28636 - DNA, 65 bp, Mus musculus
cctcaaactcactactattcaacgtgtcatggtttccaaacccaggactgaatggagcactgtcc

SEQ ID NO: 28637 - DNA, 65 bp, Mus musculus
ggtgaccccaggtctgggccagtggagtgatgaatgcaccatttgctatgaacacgcagtggata

SEQ ID NO: 28638 - DNA, 65 bp, Mus musculus
tcccatggagccacacgtcaggtcaggctgactcttagaaagggtaggttagggagtaaactctg

SEQ ID NO: 28639 - DNA, 65 bp, Mus musculus
catcgtcctcctcattggcacccgaaagcaagctgagaactttgcctacagactggagttgaatg

SEQ ID NO: 28640 - DNA, 65 bp, Mus musculus
atcaccaaagacttagaggccatgcggatgcagacagagatggagctgcgtatgttccgccaaaa

SEQ ID NO: 28641 - DNA, 65 bp, Mus musculus
gctgcagggagtgtcaagtcaagcactgggagaagcacggaaagacatgtgttctagcagcccaa

SEQ ID NO: 28642 - DNA, 65 bp, Mus musculus
cctttcaagcgctttaggaagggatcaacagcggagtgtgtgggaactgcgtggatacgaatcag

SEQ ID NO: 28643 - DNA, 65 bp, Mus musculus
ctcagagcaaggttggacctctgggctctaagcccttatctcagagtccgtagctatttcccctt

SEQ ID NO: 28644 - DNA, 65 bp, Mus musculus
aatcctaatgaggacacatggaaggaccctgccttggagaagctcagtttgttctgcgaggagag

SEQ ID NO: 28645 - DNA, 65 bp, Mus musculus
gtgcattttggccctggagaaagttcggaagatgtcgtcatgatgagcacgcctgtggttaaagc

SEQ ID NO: 28646 - DNA, 65 bp, Mus musculus
aaatccagggatgaaattgtggagatgatccggcagtctggggacagtgtgcggctcaaggtaca

SEQ ID NO: 28647 - DNA, 65 bp, Mus musculus
actgccttgttcctctggcctgtacatcttcctgaagaatgctacctgtcttccctccactcctg

SEQ ID NO: 28648 - DNA, 65 bp, Mus musculus
tcttctcaatgaacgcaactcgttgctgcacagagcctccgaagaggaaaccatctgacaggagg

SEQ ID NO: 28649 - DNA, 65 bp, Mus musculus
ccctcctgacacatcagtttccggaacttatgggagtcttcgcaaaagctttcctcagcactttg

SEQ ID NO: 28650 - DNA, 65 bp, Mus musculus
cttgtcctaccgagacaaaacaggaggctcttacttcatcactagactcatttcctgcttccgga

SEQ ID NO: 28651 - DNA, 65 bp, Mus musculus
tggcaatgccaagtgtaatggttactgcaatgagtgctaccagttcaagcagatgtatggctaag

SEQ ID NO: 28652 - DNA, 65 bp, Mus musculus
gcctccatcctgaccgttgtttcaagggtcacatccccacagtctccagccttccccactaaaat

SEQ ID NO: 28653 - DNA, 65 bp, Mus musculus
atcaacgacattgacgctaatccccgcaacaagatcccggtggaagccgacttcctctttgctta

SEQ ID NO: 28654 - DNA, 65 bp, Mus musculus
ctacaacctgaacaacagggaaaggggccattccccagaggacatctaccagatggcactcaaca

SEQ ID NO: 28655 - DNA, 65 bp, Mus musculus
gactacccgtcagtcaattgagcagctggctgcctaatgctgagcctttgctgagataacttgga

SEQ ID NO: 28656 - DNA, 65 bp, Mus musculus
attaaccccattttacaggagggaattcgggcccagaagggctggaggacttatcagccgaagca

SEQ ID NO: 28657 - DNA, 65 bp, Mus musculus
aaagcactgagaaaggcagtcctctgggagaagttgttgaacagggcctaacccgagtgaggaat

SEQ ID NO: 28658 - DNA, 65 bp, Mus musculus
cttcttggttcttgtgacaggtctccccactctggtttccatgaggtgacatgtgagctaaacca

SEQ ID NO: 28659 - DNA, 65 bp, Mus musculus
aacggctgagcgtgcaaagccgccgtttgcttctccaggtcgctgtcttccagtctccggccggt

SEQ ID NO: 28660 - DNA, 65 bp, Mus musculus
gcgagtgtctccggcgaattggagatgaactggacagcaatatggagctgcagaggatgattgct

SEQ ID NO: 28661 - DNA, 65 bp, Mus musculus
gggtagtgccattctctcctgtcattcagaagtgaaggatgaagtggaagattactggcaggtcc

SEQ ID NO: 28662 - DNA, 65 bp, Mus musculus
ggccactcgagagtatcttgctctattgattgctgtggatgatttctgtctgtggctaaagccga

SEQ ID NO: 28663 - DNA, 65 bp, Mus musculus
tgttccctactggtgaagaaatgtctccgctttcggagtatgcactgcgcatgtctcgtctgagt

SEQ ID NO: 28664 - DNA, 65 bp, Mus musculus
atgaggattctcgccttgctgtccaccattaccttgggtggtcagttttgttgcaggcaccttta

SEQ ID NO: 28665 - DNA, 65 bp, Mus musculus
tcaaagacagcctgcagtgcacctgtgaggagatgaacgacatcaacgctccgtatctggtcatg

SEQ ID NO: 28666 - DNA, 65 bp, Mus musculus
caggagaagccaaaagtcaagtcaatggaacacgcaagggtgataaccctcgtgggaagaactcc

SEQ ID NO: 28667 - DNA, 65 bp, Mus musculus
ggggagatttggcaataagtcagctccctctgaaactctgagagaagtcaacatcactgtcatag

SEQ ID NO: 28668 - DNA, 65 bp, Mus musculus
tgggtcgggaactgcctgtgcaagcttactgggaggcagacctcgaagacgagctgcagacagat

SEQ ID NO: 28669 - DNA, 65 bp, Mus musculus
agatggcagacaccacccttcccttatggcactttagccaattagtttagcttccgattgtggca

SEQ ID NO: 28670 - DNA, 65 bp, Mus musculus
acagtcttcagctacttcctgtctttgtcacctctgctctaagcagaccctgtattaggggcagg

SEQ ID NO: 28671 - DNA, 65 bp, Mus musculus
ttcaacagcaaggaaactagggcaataaagggaaccagcagagctagagccacccacacatccag

SEQ ID NO: 28672 - DNA, 65 bp, Mus musculus
atgacttccgctagttgagcttgtctgccatgctgcgtcctacagccttgagaccaaagactttg

SEQ ID NO: 28673 - DNA, 65 bp, Mus musculus
acttacatggaccggtgggatcagcgtggaccaactgttcagcacagatgctggtgtggagtaga

SEQ ID NO: 28674 - DNA, 65 bp, Mus musculus
ctatacggaaatcagaagcaaagatgaagagtagagcatgcaaagaagaaactagtgatacacaa

SEQ ID NO: 28675 - DNA, 65 bp, Mus musculus
tgctttggagggaagaagcatgtggtctgagtgctgactagatgaatagttgaggcacatccttc

SEQ ID NO: 28676 - DNA, 65 bp, Mus musculus
cacaagagcagattgccctggatgtacgtgcttacaaacaagtttccagttttggggcagaattc

SEQ ID NO: 28677 - DNA, 65 bp, Mus musculus
cgaggagcaaagatcaggagcatggcagtaactccctgagagttcttgaggtttaaggacgacaa

SEQ ID NO: 28678 - DNA, 65 bp, Mus musculus
tggtgaaagactggaaaccctgtatagaggggagctgactgaagcccatcggagcaaaggactaa

SEQ ID NO: 28679 - DNA, 65 bp, Mus musculus
accaggtgtctattctggacagctatcaatatgatgatggctgtgaaccctgtggaaatgacacc

SEQ ID NO: 28680 - DNA, 65 bp, Mus musculus
cccaagaggattgtgttttgcaatgtaacctacttgtaatctcccttgataccttgttaatcgat

SEQ ID NO: 28681 - DNA, 65 bp, Mus musculus
ctccttttgccatagatactgaaagaatgacaaatccgtggagctgacatgtctggaataaagtg

SEQ ID NO: 28682 - DNA, 65 bp, Mus musculus
gaggattgtggccttctttgagttcggtggggtcatgtgtgtggagagcgtcaacagggagatgt

SEQ ID NO: 28683 - DNA, 65 bp, Mus musculus
gctttcccagaaaggatacagctggagtcagtttagtgatgtcgaagagaataggactgaggccc

SEQ ID NO: 28684 - DNA, 65 bp, Mus musculus
agaggtggcctcggacgccaagagctttgtgctgaacctgggaaaagacagcaacaacctgtgcc

SEQ ID NO: 28685 - DNA, 65 bp, Mus musculus
gcctacttcaggaagactggaaagcgacccaaggcaaacatcatcttcaacacagctttaggaac

SEQ ID NO: 28686 - DNA, 65 bp, Mus musculus
gtgtcctgcatacaaggcagctacacttgtgttgcctggagactggattgtgcatttagctcttc

SEQ ID NO: 28687 - DNA, 65 bp, Mus musculus
tcttgaccatgctgcccatgctgtctactgtgcctccttatgagggcatcatgttggtctctgtt

SEQ ID NO: 28688 - DNA, 65 bp, Mus musculus
tgctccctgtctcaccttgcagcactccctgctagccccactgcaatcctgccaacactgattta

SEQ ID NO: 28689 - DNA, 65 bp, Mus musculus
agccctcaccaaacctcaatctccgttagtcacgccgatcatctcgactcctattaccaccgagc

SEQ ID NO: 28690 - DNA, 65 bp, Mus musculus
agagcacataggagccaccagtgactcggtacaagcagttggggctcagaaaagatctccctggg

SEQ ID NO: 28691 - DNA, 65 bp, Mus musculus
ccgctgtcatctttcatccagctggttgtcgctagccgcgccccagatccgaagcgactcgcgaa

SEQ ID NO: 28692 - DNA, 65 bp, Mus musculus
aaagaaatggagcctttggtgggacaagtgcaggattggatggtggcctacctggagacacgtct

SEQ ID NO: 28693 - DNA, 65 bp, Mus musculus
tcatgaagatcttggaggagattgacacaatggtcctaccagaacaatttaaagacagcaggcta

SEQ ID NO: 28694 - DNA, 65 bp, Mus musculus
atctatattggaaaacgactgagcacaccttctgccagcacctactgagggagacgaaaagcccc

SEQ ID NO: 28695 - DNA, 65 bp, Mus musculus
atacccaaggaggagctaaagcgcatgtgcccaaagtcagcgatcaagcactggtctctagaccc

SEQ ID NO: 28696 - DNA, 65 bp, Mus musculus
tggatcaggaaggtcattggtcgctggtcaccccaatctttggtctgatgtcccagatcatctgg

SEQ ID NO: 28697 - DNA, 65 bp, Mus musculus
aatctatcagcaaggaggagcccactgcctggggaaccacagcgacccaaacgagccaaacgaga

SEQ ID NO: 28698 - DNA, 65 bp, Mus musculus
tcaatccccttctgctgcttggatgggtggatttggtgctcagcctcctcaaggacaagcccctc

SEQ ID NO: 28699 - DNA, 65 bp, Mus musculus
tagattgtgtacaggctcgagctgctctggataaggctactgtgctcctgagtatgtccaaaggc

SEQ ID NO: 28700 - DNA, 65 bp, Mus musculus
tatagtggctcactctgaaatcctagcacttgagagttgagaactgcactttacagcagcctgag

SEQ ID NO: 28701 - DNA, 65 bp, Mus musculus
aaagtcttgctgcacctgctgaagcatcccagtgtcaaccaggaggtgacgtttgacgagagcaa

SEQ ID NO: 28702 - DNA, 65 bp, Mus musculus
attacagtgtgccaccacctcaagggcagaatggcagcatgttgcctagtcagcctgctgggtat

SEQ ID NO: 28703 - DNA, 65 bp, Mus musculus
ccagcaaatggtagttgatactcagtgagggtcaaatgactagcaggttccagggactgcttctg

SEQ ID NO: 28704 - DNA, 65 bp, Mus musculus
tagacaaccatctggtgcatgagtatgcaccgaaacgcctaatagggcctgtcctaccaacatga

SEQ ID NO: 28705 - DNA, 65 bp, Mus musculus
atggactccgatgaagacgacgccgattactaagaggacgcacttagacagacttccggagcagt

SEQ ID NO: 28706 - DNA, 65 bp, Mus musculus
ttggagtgtgcctttggaaggggctgttttgtccacagcttgaccacctccctgtgtagatgggt

SEQ ID NO: 28707 - DNA, 65 bp, Mus musculus
gcggatcggagacgagttcaacgaaacttacacaaggagggtgtttgcaaatgattaccgcgagg

SEQ ID NO: 28708 - DNA, 65 bp, Mus musculus; identical to SEQ ID NO: 23716

SEQ ID NO: 28709 - DNA, 65 bp, Mus musculus
tctgacccaaatgtgggactcactagtcttccatacgtcaaagctaggccctaaggcaggacatt

SEQ ID NO: 28710 - DNA, 65 bp, Mus musculus
cattgaagaagacacctttacactcacttccagggtgggtctacttactacctcacagaggccgt

SEQ ID NO: 28711 - DNA, 65 bp, Mus musculus
tctgagcacaggggtctatgcagggaaccctgactctctgaaacatgagggagaaaaccagtttc

SEQ ID NO: 28712 - DNA, 65 bp, Mus musculus
atgattagggttcctcccctgacaagacctatctttgcagtctttgcctccttggcctctaggtg

SEQ ID NO: 28713 - DNA, 65 bp, Mus musculus
ggctgaagctgggattgctctcctctgatgctgactgtgaaatcgagaaatgggaagatgaagag

SEQ ID NO: 28714 - DNA, 65 bp, Mus musculus
ccacaccctctgtccttgaaaacactggcactggaacatctcgccttggatctgttctccataat

SEQ ID NO: 28715 - DNA, 65 bp, Mus musculus
aacagcatcttgggtcaggtgggtcggcagcttgctctcatcggagatgatattaaccggcgcta

SEQ ID NO: 28716 - DNA, 65 bp, Mus musculus
gggagattccctccttgagactcctacatatagaaaactgatgcttctgtctcattccatgcggc

SEQ ID NO: 28717 - DNA, 65 bp, Mus musculus
gatgtgctccagtgactttgtggtcaagatgcgcattaaggagatcaagatagacaacggggacc

SEQ ID NO: 28718 - DNA, 65 bp, Mus musculus
tcctggaacggcgtttcctggccagcaataagctccagattgtctttgatttcgtggcttccaag

SEQ ID NO: 28719 - DNA, 65 bp, Mus musculus
atttgacctgaaggggactctggctaatgcaggagaagccagggatgcagagtaagagagcttct

SEQ ID NO: 28720 - DNA, 65 bp, Mus musculus
aagtcacagtcttcaaactacggggcaagcagctcgtccaccatgattgggttccatgttgctga

SEQ ID NO: 28721 - DNA, 65 bp, Mus musculus
attccctaatgaagagtcagcagtgagatatgcccgggctgccttttcccacaggcaatgccaat

SEQ ID NO: 28722 - DNA, 65 bp, Mus musculus
tctgcgtatccatcaagatggcctctacaggctgcatatccaggtgacactggccaactgctctt

SEQ ID NO: 28723 - DNA, 65 bp, Mus musculus
agttcccaactgtgagggggaagagctggggacaagctcctccctggatccctgtggattttgaa

SEQ ID NO: 28724 - DNA, 65 bp, Mus musculus
ggccaacagtccagccacagacactttcggtgtttcatcgagagacttgctttctttccgcaaaa

SEQ ID NO: 28725 - DNA, 65 bp, Mus musculus
agggtgccaaagacaggattgtagaggaaaggcacaatgtatctggtgcccacttgggatgcaca

SEQ ID NO: 28726 - DNA, 65 bp, Mus musculus
cacttgtaaacagtgtgcagaagcagttgacaaatgtcccatgtgctacaccgtcattacgttca

SEQ ID NO: 28727 - DNA, 65 bp, Mus musculus
gcccacagtgattcttcagaacatgcaagcataaagaccgctgaatgaatggtcggtccatgacc

SEQ ID NO: 28728 - DNA, 65 bp, Mus musculus
attggtcctgcttgtatcatctggccaggagacaggaggggaactgctgcttttcctaggcaaca

SEQ ID NO: 28729 - DNA, 65 bp, Mus musculus
acactctaacccacgaccatgtcaatcccagcagcagcaaagacctccccagtgacttccaatta

SEQ ID NO: 28730 - DNA, 65 bp, Mus musculus
tttcaaggaaccagtccacaggaccaaggctgcttactgcttcaggcttagggatcgcttcaact

SEQ ID NO: 28731 - DNA, 65 bp, Mus musculus
tagttcatgcttagcattcgctcagacagtgatgcgggcagagaggtgtactggagtctagagga

SEQ ID NO: 28732 - DNA, 65 bp, Mus musculus
gccagttagaactgacttgactgtgcaagaatgctataatggagctagagagaaggcacaaacac

SEQ ID NO: 28733 - DNA, 65 bp, Mus musculus
tcagaaaacgctacacacactgactggatgtccagctgtctgaatttggctgcaggtgcagcaga

SEQ ID NO: 28734 - DNA, 65 bp, Mus musculus
tcagcagcaacccctgttttccttggtgttaagatcccagtgtgaatcatgggcagttgtctggg

SEQ ID NO: 28735 - DNA, 65 bp, Mus musculus
gcttgagtaaaagtccacactcagcatttcaaagactaacgtcgttgactgcccaaggctgccct

SEQ ID NO: 28736 - DNA, 65 bp, Mus musculus
ttgaggatgtggttcagttggcggagtgtttgcagaacaagcacaaggccctagctcagccctaa

SEQ ID NO: 28737 - DNA, 65 bp, Mus musculus
aggaacatgggattgccagctgaatcctgtgaccatctagttatggacctcagagatagatcagc

SEQ ID NO: 28738 - DNA, 65 bp, Mus musculus
aaacagaacaatcgctgccctctgtgccagcaggactgggtagtccaaagaatcggcaaatgaga

SEQ ID NO: 28739 - DNA, 65 bp, Mus musculus
gatgatgacttttaccaccagctccttcgagaactcatagagcggaaaaccagctctttggatcc

SEQ ID NO: 28740 - DNA, 65 bp, Mus musculus
agatgcatcgattgaccagacacacgtttaccaacccacaggcagaaaatgcgccaagagcaaga

SEQ ID NO: 28741 - DNA, 65 bp, Mus musculus
cagaagtctaaccctaacccctctggttgtctgggacccctttctgtgcatgggtgcaatgattt

SEQ ID NO: 28742 - DNA, 65 bp, Mus musculus
ttagcagtaagctgttgtgtttcaggaaagctggacacgggaaagctgccgacacactcagcagt

SEQ ID NO: 28743 - DNA, 65 bp, Mus musculus
ggatcttcaggaccctgcaaacactgtgggtctaagttctctgcactcactgtcggcagcgttca

SEQ ID NO: 28744 - DNA, 65 bp, Mus musculus
ttcatactgacaaaatccccaaggaaactaataaatgaggaatagtcttgggtaacacactcatt

SEQ ID NO: 28745 - DNA, 65 bp, Mus musculus
aaagaccatggctttgaggtggcctgcacttcctctcaaggcaggaccttggacagtgactctga

SEQ ID NO: 28746 - DNA, 65 bp, Mus musculus
aatgtggggaacttcactggtgctaagcaggcctcatctcaaagctgggtaccaggctgaaggat

SEQ ID NO: 28747 - DNA, 65 bp, Mus musculus
acccctgaactttgggcctctgcactccttacctcctgtcttcacctctggcctgagtaccacca

SEQ ID NO: 28748 - DNA, 65 bp, Mus musculus
ccccatcttgacagtccaagtgatcgtgaccagtgattagcgtcccgtgttctaatgctcttcta

SEQ ID NO: 28749 - DNA, 65 bp, Mus musculus
attgatgggaagagcctcaagaagtacatggagaacaggtcaaagaccaccagcacctgggtgct

SEQ ID NO: 28750 - DNA, 65 bp, Mus musculus
ccagtgtagcaaagcttttacacaatttgttcatcttcagtgtcatcaaaggttacatactggag

SEQ ID NO: 28751 - DNA, 65 bp, Mus musculus
tcttagcatcctgactggcgtgaactatgacgtgagcaataaagacgacaggaggaacaagggaa

SEQ ID NO: 28752 - DNA, 65 bp, Mus musculus
ccagatcctgtggtgagccagaaaactggagaaaagccctgtgaaagccatgtgtatggagaaga

SEQ ID NO: 28753 - DNA, 65 bp, Mus musculus
ataattttgaagtaaagaccatacatgggagcaagtcagtggactctgggatctatctggacagt

SEQ ID NO: 28754 - DNA, 65 bp, Mus musculus
aacatacttggaaactgaactgtgacatgctgccgaaccacttcccgacccagagcaggagtggt

SEQ ID NO: 28755 - DNA, 65 bp, Mus musculus
attatgtcgagctgcgcgagaaacccttctacagccgactggttaaatacatgagttctggcccc

SEQ ID NO: 28756 - DNA, 65 bp, Mus musculus
atagctaactgtgtgtgagtttaccatggaatgagactcaggacccttatcctgactcttacata

SEQ ID NO: 28757 - DNA, 65 bp, Mus musculus
ctcacactgcagagaagcattttgcgtgtaacctttgtgggaaaaccttcaacagtcagagttcc

SEQ ID NO: 28758 - DNA, 65 bp, Mus musculus
agaggccagctctcttttgctaccttggctgaattgctctacagagtgaggcggtttgaccttct

SEQ ID NO: 28759 - DNA, 65 bp, Mus musculus
aaatgaaacgtccttgtcatcagaggccagcccagaggtgaagggttcaacagcagtacttgctg

SEQ ID NO: 28760 - DNA, 65 bp, Mus musculus
cagctgtggttacctctacatctgtcaatgggcgtgtctcttctcacacttggagagatgccagt

SEQ ID NO: 28761 - DNA, 65 bp, Mus musculus
tccttgtgaacacagccactgctgtttactgttagactactgctcagcactacacagctgcacgg

SEQ ID NO: 28762 - DNA, 65 bp, Mus musculus
tgggaggtcaaaggccacagagggataggtacagtcaccaccaccctggaaccaagggtctcaca

SEQ ID NO: 28763 - DNA, 65 bp, Mus musculus
gaggtggaaagcccgtgtgcagtcatgaatgtccccagtgctgtgtttgtgatgtctgttacttt

SEQ ID NO: 28764 - DNA, 65 bp, Mus musculus
ccggacaggtgtcagaggtattttcaggagcttgattcgaagcctcaccaacctcagggaaaaca

SEQ ID NO: 28765 - DNA, 65 bp, Mus musculus
cactgccaaaggcagaatttaaactaggggctgaaggatagctccgagtaatgtccaatgctggg

SEQ ID NO: 28766 - DNA, 65 bp, Mus musculus
gctcctctcttgctgatcttttagctcacacccaaagcatttcaccaacctgggccaacagagga

SEQ ID NO: 28767 - DNA, 65 bp, Mus musculus
gattagatctggaagaaatgcttcagtgtgtggctagcaaaatggagccttatgccacagctgac

SEQ ID NO: 28768 - DNA, 65 bp, Mus musculus
cagatggaaccggaccaggtgtacgaggggatcacctttgaggacttcctgaagatctggcaggg

SEQ ID NO: 28769 - DNA, 65 bp, Mus musculus
ttgactttgatgacgatggaaccctggacagagaagacctgagccagcttgtgaattgcctcacg

SEQ ID NO: 28770 - DNA, 65 bp, Mus musculus
gaagaggatgaggtagtgcttgtgtgtgacaaagtcattgaagaggctgacctggatggtgacgg

SEQ ID NO: 28771 - DNA, 65 bp, Mus musculus
gttttactgagattctgccatagagctttgagcaggaatccaagtcctcaacatggcatttcctt

SEQ ID NO: 28772 - DNA, 65 bp, Mus musculus
ctatgtcatcagtgtggtgttccggctgctgttcgaggctgtcttcatgtatgtcttctatctgc

SEQ ID NO: 28773 - DNA, 65 bp, Mus musculus
cgggtagccggcatgtgggacaagtataacgaaccgctgctacagtcggtgtgtgtattccgaga

SEQ ID NO: 28774 - DNA, 65 bp, Mus musculus
aaggagatatgcgggaatcctgtgactgataatgtaaaagacattacaaaactggtggcaaatct

SEQ ID NO: 28775 - DNA, 65 bp, Mus musculus
aactctccactttcatgcctgttgatgaacgaggaagccaggaaaagctggccaatggcgaggct

SEQ ID NO: 28776 - DNA, 65 bp, Mus musculus
ttagtgttggtgctgctcatcctgtccatgaggcgacatcgcaaacaaccctacatcatcgacga

SEQ ID NO: 28777 - DNA, 65 bp, Mus musculus
acaacttgctcatctcttgcgctgtctcttatcgtggggcttggtggtacaggaactgtcactac

SEQ ID NO: 28778 - DNA, 65 bp, Mus musculus
agggacatttggctcttctaagcaggctctgttcaccaggaggatcccctcttgccaagtttggt

SEQ ID NO: 28779 - DNA, 65 bp, Mus musculus
tactctatctacaaggacccagcaggctggctgagtatcaaccccatcaatggaacggtggacac

SEQ ID NO: 28780 - DNA, 65 bp, Mus musculus
gaggaactggtctccatcgacaagtttgctctggtaaatctccctgagctgaccaagttggacat

SEQ ID NO: 28781 - DNA, 65 bp, Mus musculus
atgccaatcaccttcccactggcttacaaagcttgactggtcgtagctatggcctgtgtccacag

SEQ ID NO: 28782 - DNA, 65 bp, Mus musculus
tctgagctacccagcattcattcctcttgaaaacggagctcctgcaggtttggggacaggtaacc

SEQ ID NO: 28783 - DNA, 65 bp, Mus musculus
agtcctggaaacaacacttgttccactgcggcatcttctctggatcgagctatggtgaaagatgt

SEQ ID NO: 28784 - DNA, 65 bp, Mus musculus
ccagcttctctcaggaaatgccaccctcaccttaattgctatgaggatggaagactctggagtct

SEQ ID NO: 28785 - DNA, 65 bp, Mus musculus
tcaggaactggtgtaagtcctccagacacatccctgtgtaaggaagccaggcactgtttctctga

SEQ ID NO: 28786 - DNA, 65 bp, Mus musculus
tgtctgggcctttagaaaggcaagcaccagagactacaggctaggagtcagctccatgcctactt

SEQ ID NO: 28787 - DNA, 65 bp, Mus musculus
cccatagaagagttgcctcctctcttgaatcttccagaggtaccacttgttaaagcgtttgtatt

SEQ ID NO: 28788 - DNA, 65 bp, Mus musculus
ctgcacggagcaggactctggaggttttgcaagtgatgatagggacaagaacatgtgtccagtct

SEQ ID NO: 28789 - DNA, 65 bp, Mus musculus
aggagcaaatcagcctggagagcgtagccatggacagcccagtcaacatgaagttcaacctctcc

SEQ ID NO: 28790 - DNA, 65 bp, Mus musculus
ggaacatgcagcccacagagagtgctgacagtttagtggaatatggagagggagaccagtccata

SEQ ID NO: 28791 - DNA, 65 bp, Mus musculus
atcacggaggcacagaagcaaggcctcctgtctatagcagcttcctcagcttactactgccttag

SEQ ID NO: 28792 - DNA, 65 bp, Mus musculus
gggccccttactctccttaggacgatcaagcaacatcaaagaactgtagagtgttgttcatagcc

SEQ ID NO: 28793 - DNA, 65 bp, Mus musculus
ctggccatacaggggacatggtcattctccgagccagctgtgttttacacaaagctgtacaattg

SEQ ID NO: 28794 - DNA, 65 bp, Mus musculus
gctgggactagatcggatacttgggattatagctctatagtgtttgtgctattgctaactgcgca

SEQ ID NO: 28795 - DNA, 65 bp, Mus musculus
cagaggctggacctgggacacatctctttacacctttcattctgtcatttctcccaaaggcatcg

SEQ ID NO: 28796 - DNA, 65 bp, Mus musculus
tagctcctatctcctctgtccctgagcttctctgagccgcggatcctgcgaattgccattgctcc

SEQ ID NO: 28797 - DNA, 65 bp, Mus musculus
caggggcacactgatagtttctgacccatactagggctgtgtaagggtggggttgagtcattaga

SEQ ID NO: 28798 - DNA, 65 bp, Mus musculus
cgtcctggagaatgacccaagaccctgatgatggaaaggtaaatagctcagtcaccatgaaggga

SEQ ID NO: 28799 - DNA, 65 bp, Mus musculus
ggaacccttccccaagaagagctcaccccaaagcaacgggagtctaccttgttcccttgttgatt

SEQ ID NO: 28800 - DNA, 65 bp, Mus musculus
ctcaacgtccccaagaacatgcaagtcagcatcgtgtgcaagatcctggcagaccacgtgacctt

SEQ ID NO: 28801 - DNA, 65 bp, Mus musculus
tgtccaattgccctatctctgggtctggggcagacagagagcctcaatctgggtcacaaagcgac

SEQ ID NO: 28802 - DNA, 65 bp, Mus musculus
aatgtgacaacttcggacacctctaggacgacaggaagaccactaacatactggaggttgtgtcc

SEQ ID NO: 28803 - DNA, 65 bp, Mus musculus
gctatgcaaatggtgtcaactggaagtcatggagagggtacaactacagctgcaaggtttctgag

SEQ ID NO: 28804 - DNA, 65 bp, Mus musculus; identical to SEQ ID NO: 23716

SEQ ID NO: 28805 - DNA, 65 bp, Mus musculus
atcgtcaccgggtacagcgaccagcaaccagacatcatttccaacggaagcattttgtccaacga

SEQ ID NO: 28806 - DNA, 65 bp, Mus musculus
gaggaaacgagtgcctccatattctccttgcctcctctctggactctcacttgcttccaaagaaa

SEQ ID NO: 28807 - DNA, 65 bp, Mus musculus
aagttttgagatggtcaaaggaggccacaccttggagtcccacaagggaggagtgctaggagcag

SEQ ID NO: 28808 - DNA, 65 bp, Mus musculus
agggctgccaaggccctattttggataactacatctcggcactcagcgcgctctggcacccagac

SEQ ID NO: 28809 - DNA, 65 bp, Mus musculus
tgaagctcactccgagacatcagaccttgtccaccctggagagcatagacgttcaggagtttatt

SEQ ID NO: 28810 - DNA, 65 bp, Mus musculus
ccaggcagttctaccgtatacttggacccttgggttatagctagccactgctggtgtttatgtga

SEQ ID NO: 28811 - DNA, 65 bp, Mus musculus
ttctacgtgcaatccaccgcttgcaagaagggcgagtacaacgtccaggaggctgagagctcagg

SEQ ID NO: 28812 - DNA, 65 bp, Mus musculus
accggtgagactgggcttggactgtacaagacttgagtcctagacctgggtgtatttgcactttg

SEQ ID NO: 28813 - DNA, 65 bp, Mus musculus
tgtgccagtctgccaccagacccagcagaagcaggcgcctacctggccgtgcaagtaaggtcacc

SEQ ID NO: 28814 - DNA, 65 bp, Mus musculus
ataaccatgttctccttgaatagctacccctccaaggctgcagttctggatgccgtgaaagggct

SEQ ID NO: 28815 - DNA, 65 bp, Mus musculus
ctctagtcttcggagcctctcttctgtctccacaaaatgtgccactgggattctcctggattcaa

SEQ ID NO: 28816 - DNA, 65 bp, Mus musculus
aaatgtgaccaacctgcagctgtcggacattggcacttaccagtgcaaagtgaagaaagcccctg

SEQ ID NO: 28817 - DNA, 65 bp, Mus musculus
agacggtaaaccgaggaaggcaccattagaatgcacagactgacccttgacacacagacctcagt

SEQ ID NO: 28818 - DNA, 65 bp, Mus musculus
atctgccttggtgggacctgtttcagggtttctctttgctgcttgtctttgctgagacctggaca

SEQ ID NO: 28819 - DNA, 65 bp, Mus musculus
ggtcctcagagcccgtatgggtagatgatcaccaggggctgatgggtcatgggacaactatcaca

SEQ ID NO: 28820 - DNA, 65 bp, Mus musculus
gcacaggaactggtgagctgtctggtttactcactaccacatgctttcatacctgctgtacacgt

SEQ ID NO: 28821 - DNA, 65 bp, Mus musculus
tcccttagagctttaacctggtttagtaccttcccactgcacattgcacagtggagtggtcccca

SEQ ID NO: 28822 - DNA, 65 bp, Mus musculus
ccacattgagcctccactcagaacattgtcaggctacatggtcactactaccactttgtgaggga

SEQ ID NO: 28823 - DNA, 65 bp, Mus musculus
ggaagaatgagggatgtggtaagaatgtggagcagaagagggcaggactgaatcaagtagagtcg

SEQ ID NO: 28824 - DNA, 65 bp, Mus musculus
aagccaagaatacccaaaaggggaaacacccggatggagaagaggatggcaacagtgaccagagt

SEQ ID NO: 28825 - DNA, 65 bp, Mus musculus
gtgtggctcacacatttcttgcctgtgaccaatgccttaaatgcatcctcttggaaggaaaggca

SEQ ID NO: 28826 - DNA, 65 bp, Mus musculus
gccagctgtttcgaacattaatcagagagaagctcttgttagaggcaatgggaaaatcgtgtaac

SEQ ID NO: 28827 - DNA, 65 bp, Mus musculus
ccatcttgagtaggaaaggctgaaaggccagtatttggtcctagacaaatcactgtcccctggtc

SEQ ID NO: 28828 - DNA, 65 bp, Mus musculus
atcgaatcatcttcctcccacgtgtcggaagggcagagtctggatctgaattgccttgtttctgg

SEQ ID NO: 28829 - DNA, 65 bp, Mus musculus
gacgtggacatcgctgatgccgcctactacttcgaaagggacattaaaggcgagtcactgttcat

SEQ ID NO: 28830 - DNA, 65 bp, Mus musculus
ccatattctcaggttatggcctaggagtgtcattacgggtacaaggtgcagttcctggtgaatat

SEQ ID NO: 28831 - DNA, 65 bp, Mus musculus
tcagacctgtgtgttccctactcagccgtctgtgcctcagaagaactggtacatcagcccgaacc

SEQ ID NO: 28832 - DNA, 65 bp, Mus musculus
cctgtccagaaatgctcagctgtttaagcgttccttgctggagatggccaccttttgagaagaca

SEQ ID NO: 28833 - DNA, 65 bp, Mus musculus
acccccacaagaatgtgcaataatttggaaatttgcccagtcagcaagaagcggcattgcactga

SEQ ID NO: 28834 - DNA, 65 bp, Mus musculus
cagcatgcagaaacagaaccatctacaggcagacaacttctaccaaacggtgtgaacacgggcag

SEQ ID NO: 28835 - DNA, 65 bp, Mus musculus
cccaatggccgcaactgccaagacattgatgagtgtgtgaccggcatccataactgttccatcaa

SEQ ID NO: 28836 - DNA, 65 bp, Mus musculus
ttgctgggtggatgtcagaacactcttagaaaaattgagacctgaccactttctcggatgttgga

SEQ ID NO: 28837 - DNA, 65 bp, Mus musculus
gagtgttgggcttcaaaccgaagcctcccaagaatgaatccttggagacttacccactgatgatg

SEQ ID NO: 28838 - DNA, 65 bp, Mus musculus
cggtcacttactcggtgatacagaagcggcctatgggggattatgagaatgtgaatccgagctgc

SEQ ID NO: 28839 - DNA, 65 bp, Mus musculus
aggtcgtccatgtcccgagaagagcagccgattcctggattgcgagagtcctgtgcacgtattta

SEQ ID NO: 28840 - DNA, 65 bp, Mus musculus
tatttgcaagctgccgatgccatggtgcgctcaggcgtgctgacgttatgtgtggggaccactcg

SEQ ID NO: 28841 - DNA, 65 bp, Mus musculus
gacttgctgcatttctgcatgctgctggtgagagctgattgacccaatcttccacacaggcactt

SEQ ID NO: 28842 - DNA, 65 bp, Mus musculus
gtcccctttgatgccgtggtagtggataagtccacgggtgagggaataatccggtcaaaagagaa

SEQ ID NO: 28843 - DNA, 65 bp, Mus musculus
ccacagaatggcagatggaggaggaagcccctttctgggacgtagagattttgtctacccttcct

SEQ ID NO: 28844 - DNA, 65 bp, Mus musculus
attcctttgagacccgtggatccttctgcggaccctaatgacacaaagtggagctcaactgtcct

SEQ ID NO: 28845 - DNA, 65 bp, Mus musculus
atctaactggtcagaagcaggtcttcaaagcagagaacaacccctgggttaccccgattgctgac

SEQ ID NO: 28846 - DNA, 65 bp, Mus musculus
gggaagactgtgtggtgatcttgggaaatggcaagtggaacgatgtcccctgctctgactctttt

SEQ ID NO: 28847 - DNA, 65 bp, Mus musculus
caacactggaagtgtcttgaatgcttgcttcagccatcagccagcaaggaagaacagaccaattc

SEQ ID NO: 28848 - DNA, 65 bp, Mus musculus
caagtggtggataaggatggagaacagggatggaaaatcccagaagaaacagcagtggagaggct

SEQ ID NO: 28849 - DNA, 65 bp, Mus musculus
ctccagctccagcaatgtgctgcaaacaccccttcttagacacatcagtccatcttggcacttgt

SEQ ID NO: 28850 - DNA, 65 bp, Mus musculus
cgctctccaaggcaaagctcccgggcgggccgctccgggctccggttctcctggctcctgtcagt

SEQ ID NO: 28851 - DNA, 65 bp, Mus musculus
agttgagtaactttccactgagtgacagctggaggaaggggcatacagacacaaagaggcccaag

SEQ ID NO: 28852 - DNA, 65 bp, Mus musculus
gctaagtagagaacactgtcttattccacagggaggtagcagatttcagactcaaccaggtggtg

SEQ ID NO: 28853 - DNA, 65 bp, Mus musculus
atgagctgagccctgagaccagcccttatgtcaaggagttcagagatggctgtcagacccagcaa

SEQ ID NO: 28854 - DNA, 65 bp, Mus musculus
aaaaggttacagagatccgacttcaaaaggcagggtctgagtctggcaggtggagaggtgctaag

SEQ ID NO: 28855 - DNA, 65 bp, Mus musculus
tgtgcagtggactgtatatgaggagcaaggaagcagcaaggtcttccagggcaacttggacaaca

SEQ ID NO: 28856 - DNA, 65 bp, Mus musculus
atgttgaatgccgcatcaacgctgccaatattgccacagacgatgagcgggacaagttcgctggc

SEQ ID NO: 28857 - DNA, 65 bp, Mus musculus
ctaacaagctgttcaactgatttcccaacacatcacgactgaggcattcaggaaccccttcatcc

SEQ ID NO: 28858 - DNA, 65 bp, Mus musculus
aagagacctgagaggagtgtgagcagacctcttcgtgttcccactgcaagccagtaactgtacca

SEQ ID NO: 28859 - DNA, 65 bp, Mus musculus
acaccactgctcagctttcttggagaccaggacctgacaaccacagccccatcaccatgtatgtt

SEQ ID NO: 28860 - DNA, 65 bp, Mus musculus
ctatccagcaaattcagtggtgctctctccagacttctgccatgccttgttctcagcgtggttat

SEQ ID NO: 28861 - DNA, 65 bp, Mus musculus
caacaaacctcagtcagaaaccctgaaagcaggagacttgaggacgcgtattagccgatgtcaag

SEQ ID NO: 28862 - DNA, 65 bp, Mus musculus
caaaacttctcgaccgggaaaccctgctgtggcacaacatcacagtgatcgcaacggagattaaa

SEQ ID NO: 28863 - DNA, 65 bp, Mus musculus
atactgtctgagatcaaggaggctgttgctgccctaccctcggatgtgaccacacagtctgtgat

SEQ ID NO: 28864 - DNA, 65 bp, Mus musculus
atagtattgccatcatgctgtagagttctgcgtgtttacccagtcatagctgagcgtggcatctg

SEQ ID NO: 28865 - DNA, 65 bp, Mus musculus
aatggaatgataaggcttgtggagagcagcgccttgttatctgtgagttctgagccactggaggt

SEQ ID NO: 28866 - DNA, 65 bp, Mus musculus
gcttgaccttagctagaaattgcttccagttatatccagtgggaggtccatctcagttttccacc

SEQ ID NO: 28867 - DNA, 65 bp, Mus musculus
acctgtctggtaaaggccttgtcctgccctctgtactgggtatcacctttggtgccttcctgatt

SEQ ID NO: 28868 - DNA, 65 bp, Mus musculus
cttgctgaatctgaacagtactttgcaggcaacccgagccttgatggtaattggcatcctgctgg

SEQ ID NO: 28869 - DNA, 65 bp, Mus musculus
ctgagcaactcaatctggtcactacctggttgcagctacagatacctcggatagaggatgggaat

SEQ ID NO: 28870 - DNA, 65 bp, Mus musculus
ttgactgctgtctcctggtatgctaccctggtaacacaggaattcttcaaccccagcactcctgt

SEQ ID NO: 28871 - DNA, 65 bp, Mus musculus
caccagcgtcctctgcaaccctaagacgacagcggaatttcaatggcaaagtgtctcctagagga

SEQ ID NO: 28872 - DNA, 65 bp, Mus musculus
ttattccacaaacggcttgacaactcaaactatgggagcttctgggcagacagctttcaccacca

SEQ ID NO: 28873 - DNA, 65 bp, Mus musculus
ttccctcattaactttccaaccagagttaaagagacaaagctgcaagagcattgggactgttctc

SEQ ID NO: 28874 - DNA, 65 bp, Mus musculus
aaggtgatattgcctaggtacaaccaacagcttcttctagaccccactgggatagagccaccagg

SEQ ID NO: 28875 - DNA, 65 bp, Mus musculus
tggtagctgaaaaccagcaaggaaaatccaaggcagctcactttgtgttcaggacctcagcccag

SEQ ID NO: 28876 - DNA, 65 bp, Mus musculus
gaagtcggtccagcttgctttcttggataagattaggacgaagaccttatgaaaccaacaggaaa

SEQ ID NO: 28877 - DNA, 65 bp, Mus musculus
atagactcatacccagattctgatccttcttggcctcctcagagcactgaaccgatgtgtcccca

SEQ ID NO: 28878 - DNA, 65 bp, Mus musculus
gcccctggtttcgagtctcttctcaaggtgacactaactaatgggatgttcttttggcatgctat

SEQ ID NO: 28879 - DNA, 65 bp, Mus musculus
aaaccacctcaattaccccttcagcatcgtcagctatgcagatcacttctaccacacggactggc

SEQ ID NO: 28880 - DNA, 65 bp, Mus musculus
atatcggactcaggctcggtctcagaatcggtctcggtctcgtagtcgtcctgatcgtactctag

SEQ ID NO: 28881 - DNA, 65 bp, Mus musculus
cctggctggagaagttggcagtaaaggagccaagggagacagaggtttgcctggacccagaggcc

SEQ ID NO: 28882 - DNA, 65 bp, Mus musculus
cgtgagacgatttggtacacagacgacacagaccttgtgaactcgtcaacgtgactaggttttga

SEQ ID NO: 28883 - DNA, 65 bp, Mus musculus
aaggaggaacaggatcaagatctcgatccggaccaggacatggaaccgtacttgccaccagttta

SEQ ID NO: 28884 - DNA, 65 bp, Mus musculus
tttgattctgtgaagccgggactttctgcttttgtggatcagcccaaacagggtgctgagactgt

SEQ ID NO: 28885 - DNA, 65 bp, Mus musculus
agtctggtcaaagagcatttagcaaagggccggacaagtgaaatccgtagcgttgtaggctccct

SEQ ID NO: 28886 - DNA, 65 bp, Mus musculus
agatattctcagcatgaggatggcttcacatggctttctctcagtactccctttatgcccacgac

SEQ ID NO: 28887 - DNA, 65 bp, Mus musculus
tttaagaacgtgacctacaagcacagggagaagcacaaagcaggcctttcctcagatgggtagac

SEQ ID NO: 28888 - DNA, 65 bp, Mus musculus
cacaaaggggacagactttggggaactatagccaaatgtggactctgggaaaacacctgcagaca

SEQ ID NO: 28889 - DNA, 65 bp, Mus musculus
atcttacgaggcaagagaacgctatacccagagtcctggactaacagaggctgcacctgtccaat

SEQ ID NO: 28890 - DNA, 65 bp, Mus musculus
gagagagatttggacctttggtggagcagttaagcaggacccacagagaattcacctcaaaatct

SEQ ID NO: 28891 - DNA, 65 bp, Mus musculus
aaactgggattgagcttcaacagcatcaccgttatggagaatggcagtctggccaatgttcctca

SEQ ID NO: 28892 - DNA, 65 bp, Mus musculus
gccatcttccttcctggtaaacagagaagcttgtgtctgaagaatggacactctttgctctaagc

SEQ ID NO: 28893 - DNA, 65 bp, Mus musculus
gccatggaacccttccgttgattagcaatgactgtgcttgacccacccacctaccctactaatga

SEQ ID NO: 28894 - DNA, 65 bp, Mus musculus
ggaacagagccaagacgtcacatctgactgcagactttccctccaccaaagcacccaaagatcat

SEQ ID NO: 28895 - DNA, 65 bp, Mus musculus
atagttctagttaccaaactcaacggcagtgagcattctcaaccctgagcaggccatctctgctc

SEQ ID NO: 28896 - DNA, 65 bp, Mus musculus
ctgtgagagtctggggaaagatcacatgggtcgagggtttctctactggtcaggatgcttttctc

SEQ ID NO: 28897 - DNA, 65 bp, Mus musculus
acagcccaaagccaagagtgagttcaactcatacagcctgactgggtatgtgtgaagaaccaggg

SEQ ID NO: 28898 - DNA, 65 bp, Mus musculus
gaggagtgggatttgtttttctgtagaccagatgagaaggaaacaggccctgttttgtacatagt

SEQ ID NO: 28899 - DNA, 65 bp, Mus musculus
ccagcacctgatccccaagattgaggatggaaatgattttggggtggcaattcaggagaaggtgc

SEQ ID NO: 28900 - DNA, 65 bp, Mus musculus; identical to SEQ ID NO: 23716

SEQ ID NO: 28901 - DNA, 65 bp, Mus musculus
agccctattgcctatgccagcctggcttcagtggccatcactgtgagcaagagaatccatgtatg

SEQ ID NO: 28902 - DNA, 65 bp, Mus musculus
catggctcctttgagagaagctattgtagaacctcctaccctctgtccatcggagctaaagcgca

SEQ ID NO: 28903 - DNA, 65 bp, Mus musculus
atgtgggaaccggatgcagggccatgaagatcagaactggacagctccatagaaacccaagtcca

SEQ ID NO: 28904 - DNA, 65 bp, Mus musculus
ggagatggagtttgagtttgatcggttgaggaccttccagaccatgcaggtccactgtaacaaca

SEQ ID NO: 28905 - DNA, 65 bp, Mus musculus
actgtggatttgggaaaacgggtatcatcgattatggaatccggctcaacaggagtgagcggtgg

SEQ ID NO: 28906 - DNA, 65 bp, Mus musculus
tcagtgacctacatgcatcttggtctggtccttagtggctagtccttccactctgaaagcaaagg

SEQ ID NO: 28907 - DNA, 65 bp, Mus musculus
tgtgtattctgtggaggactaccaggagcctgaagttccatgggatggtgaagccgagattaagg

SEQ ID NO: 28908 - DNA, 65 bp, Mus musculus
tcaaacgcagcaagggtggcaaatactcagtgaaggacaaggaggacactcaggtagattccgag

SEQ ID NO: 28909 - DNA, 65 bp, Mus musculus
accactttctctgcagtggaaagggatcgccagtggaagttcatcatgtgccggatgactgacta

SEQ ID NO: 28910 - DNA, 65 bp, Mus musculus
aacttttctcccatctggcttgccacatcttctctttgccattgcattcctggggctgtggtaga

SEQ ID NO: 28911 - DNA, 65 bp, Mus musculus
catcagacactatctggtcaagtacagagcgaagctcgcctctgagtggaaaccggaaatcaggc

SEQ ID NO: 28912 - DNA, 65 bp, Mus musculus
cacagccagtccatagccctcctccacaggctcctgctaactcttccacccatgttccgttgtct

SEQ ID NO: 28913 - DNA, 65 bp, Mus musculus
ataccttaggaatatctcagttccttgcttccaggatgaatgagtccactttgacctccctgaga

SEQ ID NO: 28914 - DNA, 65 bp, Mus musculus
ttatgcctatgaagggaatgattctgttgccaattctctcagctccttagaatctctcacagctg

SEQ ID NO: 28915 - DNA, 65 bp, Mus musculus
gagctctttagaatcaggtaccactgaaggagaccaaaactacgattacctccgagaatggggtc

SEQ ID NO: 28916 - DNA, 65 bp, Mus musculus
aaagaaggctcagtgtcgccaatgctgctcctgaccaagggagaggtgaaagttcggcattttaa

SEQ ID NO: 28917 - DNA, 65 bp, Mus musculus
gctgccctcgttgctggtgtcgtctactggctgtacatgaagaagtccaaaactgcatcaaaaca

SEQ ID NO: 28918 - DNA, 65 bp, Mus musculus
gggactgacttctccttgatgcctctgaacctgggtgatgcagaaactggattcctgactcagag

SEQ ID NO: 28919 - DNA, 65 bp, Mus musculus
ccgctcctcccaatggcgaagaagacgtacgacctgcttttcaagctgctcctgatcggggactc

SEQ ID NO: 28920 - DNA, 65 bp, Mus musculus
tggggcttcaaggctatgtgttggagttctgtcgagagggagcctcagaatgggtgcctgtgaat

SEQ ID NO: 28921 - DNA, 65 bp, Mus musculus
aattaccctgggaaagtgggcctaccttgccatcttgctgggcattgctctgctattttcggtac

SEQ ID NO: 28922 - DNA, 65 bp, Mus musculus
acgcacttcatcctcaccagatgtacatactctgctgtctgctgggaaagcccctggaatacatt

SEQ ID NO: 28923 - DNA, 65 bp, Mus musculus
ttacttcaacttccaagtgatctccaagtgggacctttgtctgtttatcaagtcttcctccgggg

SEQ ID NO: 28924 - DNA, 65 bp, Mus musculus
ggccgatacaaacagaagcaccagtcggtattcacagtcacccggcagaccacccagtacccaga

SEQ ID NO: 28925 - DNA, 65 bp, Mus musculus
gttcttcccaggcagtgagggagttgtcacattagagctccccaaggccaagatgccctatgtga

SEQ ID NO: 28926 - DNA, 65 bp, Mus musculus
acttgccagagaatgttcaaaccctttcctggtacacaggagttaaaccactcaagaattgtgaa

SEQ ID NO: 28927 - DNA, 65 bp, Mus musculus
gcgaacaaatggcaagtttggaagggctaatgaagcaactcaacgccatcacaggctcagccttt

SEQ ID NO: 28928 - DNA, 65 bp, Mus musculus
ttttaaagccttgtgtgagaagcccgtttgttcccagctcaatgcatgggaaaggcctgagatgg

SEQ ID NO: 28929 - DNA, 65 bp, Mus musculus
atgcctttccagaagggcaagcacttcgagctggtgttcatggtcatgcctgagcactacaaggt

SEQ ID NO: 28930 - DNA, 65 bp, Mus musculus
ttacctcagcgagagggtgcagagctgggacaggcagctaaaatgagcagctcccaagagtcact

SEQ ID NO: 28931 - DNA, 65 bp, Mus musculus
gcagttctatagcctggagggagcaccatattgtgagggctgctacaccgacactttggagaagt

SEQ ID NO: 28932 - DNA, 65 bp, Mus musculus
tctcgagcaccagacctcatgggaccagaccccacgggactacatggcacaatgggacacctgtt

SEQ ID NO: 28933 - DNA, 65 bp, Mus musculus
ggatcagaccggaaacaatcgggtcttctatggaaactcagaccggagttctacagttcagaact

SEQ ID NO: 28934 - DNA, 65 bp, Mus musculus
tcaggtacgactgctgtggactgacccacggaatgtgggttggcgagacaagacatcctatagat

SEQ ID NO: 28935 - DNA, 65 bp, Mus musculus
cccgaaacaacctgcaagaaacagaactgttgagtattggttggactgctcatggatttggtagc

SEQ ID NO: 28936 - DNA, 65 bp, Mus musculus
atcagagaggagcatggaggagagatggcagcggaagaagcagaagagcagaaggagcgagtaga

SEQ ID NO: 28937 - DNA, 65 bp, Mus musculus
gtcctcctggatattgtgattcatcccagtgtgccagcatcccgtacaatgggcaaggctatcca

SEQ ID NO: 28938 - DNA, 65 bp, Mus musculus
gtagactcagaagtgaaccatgtagttgggccgttgaatccaaagccagttgatcacagggagcc

SEQ ID NO: 28939 - DNA, 65 bp, Mus musculus
tccctactcttgatcgacatgtagttcctccagctgtctcccagctaatttccctgtagtctgct

SEQ ID NO: 28940 - DNA, 65 bp, Mus musculus
agggaaccggagttgagccactctgggtcagagcggccagaacacacgggccttctcatgggtgg

SEQ ID NO: 28941 - DNA, 65 bp, Mus musculus
tgacaagctgctctacaacggcagacagaactacaatccgcagacaggcatcttcacctgtgaag

SEQ ID NO: 28942 - DNA, 65 bp, Mus musculus
cccgctttaagagactgggcgaactctactctgttggtgaaagtgacaaagaaacttgacagtgg

SEQ ID NO: 28943 - DNA, 65 bp, Mus musculus
tgctccatgtgaggagacccagctctccatggttcagcttcaaggcttcaaccttgtggcaggga

SEQ ID NO: 28944 - DNA, 65 bp, Mus musculus
ctggataaaggggaactacggcatcttggagctcacaaatgtgaatcaagcagtccggcattctg

SEQ ID NO: 28945 - DNA, 65 bp, Mus musculus
aacattcatgccaccaagacattggacagagaggagagagcccagtacacactgatggctcaggc

SEQ ID NO: 28946 - DNA, 65 bp, Mus musculus
cctctcatgttctccactcaataggcacacacccaagaaactggccacaatccttttcacctttg

SEQ ID NO: 28947 - DNA, 65 bp, Mus musculus
gtatctctcagtggaaatttagttctaccgtttattttggagacacttaggggatatcaaccaga

SEQ ID NO: 28948 - DNA, 65 bp, Mus musculus
caaagcctgagcacctactttatgggatgaccatgggaacactccaaatggcagctctttgtcca

SEQ ID NO: 28949 - DNA, 65 bp, Mus musculus
aggtggaccagagccggaattacatcagtaactcggcccagagcaatggggcggtggtgaaggag

SEQ ID NO: 28950 - DNA, 65 bp, Mus musculus
cccagagcaacggcacgctcatgaaggagaagcaagccagctccaagagcggccataagaaacag

SEQ ID NO: 28951 - DNA, 65 bp, Mus musculus
gatatcaggcaatgtcttgccagatgctacgaggttccatatcaaccttcgctgtggaggtgaca

SEQ ID NO: 28952 - DNA, 65 bp, Mus musculus
accttgaacagctacgactaactgatgagctggctcctcctaagccacctctgcctgagggtgaa

SEQ ID NO: 28953 - DNA, 65 bp, Mus musculus
gaagcgtggttatatcagagggaatttggggccctatcagcagaagagcgaattcagagattccc

SEQ ID NO: 28954 - DNA, 65 bp, Mus musculus
agagaattctgagtgggaggagaactacagcttaagtccagccaggagtcaatccagcctgcatg

SEQ ID NO: 28955 - DNA, 65 bp, Mus musculus
tgaacgacaaccgtcccgagttcatcaaccaggtctacaacggctctgtggatgagggctccaag

SEQ ID NO: 28956 - DNA, 65 bp, Mus musculus
ccagtgtcttaccagcctcttgcaccatgtggttatttgcctcgcttgttctgaaatctctacac

SEQ ID NO: 28957 - DNA, 65 bp, Mus musculus
actttagcaccatgacgcacctgctggagaatctcaaaggcagcatttgcccagaggagggcatt

SEQ ID NO: 28958 - DNA, 65 bp, Mus musculus
gctgatttttctgctttatagatcttttagaagccattgtacactaggtacaaacttttctgctg

SEQ ID NO: 28959 - DNA, 65 bp, Mus musculus
tgaccaccaacattaggttccgaggctgcatccgatctctgaagctcaccaaaggcactggcaaa

SEQ ID NO: 28960 - DNA, 65 bp, Mus musculus
cgcttgcccatcatagatgttggtcctgtggatattggcaatgcagaccaggaatttggccttga

SEQ ID NO: 28961 - DNA, 65 bp, Mus musculus
gcggcagaggaaaggcatcctgaagaacaggttgcagtacccactggtgcctcagagtcgaggca

SEQ ID NO: 28962 - DNA, 65 bp, Mus musculus
tatgcacaacagagacgccaatgacaagaacgagagcctcacagccttggatgccctcatatgta

SEQ ID NO: 28963 - DNA, 65 bp, Mus musculus
caccaggccttttggtgctattcctttccatagttgagcactggatacctcctgatccctgcctg

SEQ ID NO: 28964 - DNA, 65 bp, Mus musculus
cacagttgaatctcagcaagtgatatggatttaaaggcggggttagaattgtctgccttccaccc

SEQ ID NO: 28965 - DNA, 65 bp, Mus musculus
ttcgaagaggtgacgatccctccgctagattcccagcagcatacggaagtgtgacgctcaaactc

SEQ ID NO: 28966 - DNA, 65 bp, Mus musculus
acacacctgagcttcggacgttttcacctctctccacaaggttcatcaggatctaccctgagaga

SEQ ID NO: 28967 - DNA, 65 bp, Mus musculus
ccagtagtgagcagatcaggattccaagaataaccagtatggatgcaagaggatccacgtcagcc

SEQ ID NO: 28968 - DNA, 65 bp, Mus musculus
acagcgatgatgatgcccacgaccccaccagcagtccccatcctcactaatagacgttactaaga

SEQ ID NO: 28969 - DNA, 65 bp, Mus musculus
cttgccctcaattaccatgtttgctgtattctaatagtcactcatgttcctgaattctgttgccc

SEQ ID NO: 28970 - DNA, 65 bp, Mus musculus
ggctgagccaccaggaccaatggatttaagctgacatttcagtccaagacgacgacttctaagtg

SEQ ID NO: 28971 - DNA, 65 bp, Mus musculus
ctaatccctacgggttcacagtttcctggacggcatcggagaatgcctttgacagctttctagta

SEQ ID NO: 28972 - DNA, 65 bp, Mus musculus
actgggaaatcgataggaagctaaacgcaatcctaattgtgaccgcattcaacacctttctagtt

SEQ ID NO: 28973 - DNA, 65 bp, Mus musculus
atccttatccgcttcagtgactacgtggaagtggcagatgcccaagactatgaccgaagggcaga

SEQ ID NO: 28974 - DNA, 65 bp, Mus musculus
ccacagacatgtaaccagcaggaatgccttaccctagtgggtttaattcttccatcatttcgctg

SEQ ID NO: 28975 - DNA, 65 bp, Mus musculus
gtcttataaccactttactgatctgcataaccagttaaccccatataccaatctgagaaccctgg

SEQ ID NO: 28976 - DNA, 65 bp, Mus musculus
aaccacctgtgcactacaggcaacaaactgtcaaacagaagttggtgcctcctttacggggtcag

SEQ ID NO: 28977 - DNA, 65 bp, Mus musculus
acccctctatgatgaagtacaaatggacccttatgaccttcgctggcctgaggtcaagtatgagg

SEQ ID NO: 28978 - DNA, 65 bp, Mus musculus
gaagctggaaggtggaggcccagaatcctgtccattttgtccaggaaagggttcatactctgcta

SEQ ID NO: 28979 - DNA, 65 bp, Mus musculus
gagaatgtgaccagagttcggctggtacagttccaaaagaacacggatgagccaatgggaatcac

SEQ ID NO: 28980 - DNA, 65 bp, Mus musculus
gctgggcatgcttctcataccccctgccagcatcctctcgctcacctgcatctcgggcgcgctgt

SEQ ID NO: 28981 - DNA, 65 bp, Mus musculus
aacgtctcaggcctcgaccttcgagacatcagtgaaacactctttgtgcactgctgaccctgcta

SEQ ID NO: 28982 - DNA, 65 bp, Mus musculus
actggctctgattcttgccgtctgcatcgcggtcaatagtaggagaaggtgtgggcagaagaaaa

SEQ ID NO: 28983 - DNA, 65 bp, Mus musculus
aacactgtgagcacctaagtgtgaaacttggggcattctacgggatcctcttcggaaccctgggc

SEQ ID NO: 28984 - DNA, 65 bp, Mus musculus
agtaccacccagaggcttctgacggagactgatatacgtgtgacagctgagccaggcttggattg

SEQ ID NO: 28985 - DNA, 65 bp, Mus musculus
cctttacacctcccctctatagtatctactgcaccgaggaccttttatctgaaatgctttggacc

SEQ ID NO: 28986 - DNA, 65 bp, Mus musculus
cctggtagtacagaggtacttacaggttgtcattcttatccttccagattcctgtctgccagctc

SEQ ID NO: 28987 - DNA, 65 bp, Mus musculus
ttcaacatctctcctgaagagtgaaatcccaggactgtattgctgagagcacccagcagtctcag

SEQ ID NO: 28988 - DNA, 65 bp, Mus musculus
cagcatctcggagtaccagatccttgaagtctatgagccgatgcaggacaaccaaatggtcatca

SEQ ID NO: 28989 - DNA, 65 bp, Mus musculus
gaaaatgggccaaaatccagatgagatggatgagaccacagaactcaacagctaaaccatcggcg

SEQ ID NO: 28990 - DNA, 65 bp, Mus musculus
actgtgagcctttccgatggaaggatgtgactctgacgacaacactgatccccacctcagccatg

SEQ ID NO: 28991 - DNA, 65 bp, Mus musculus
ggagtggaatactatcctgtagtctaagatggattgaacacacggcatgtagacccagagcctct

SEQ ID NO: 28992 - DNA, 65 bp, Mus musculus
agataagacgtgtagactcactgggaaaggggtcttgtctgctcaaagcctcaactccaggctca

SEQ ID NO: 28993 - DNA, 65 bp, Mus musculus
ttatgagtactggtagtgcagactccccataagcaccacaatgagctagcaggaggaagctctga

SEQ ID NO: 28994 - DNA, 65 bp, Mus musculus
ctgtacaataggcagcagcattacgacccaagatctggtatctttacctgtaagatcccaggcat

SEQ ID NO: 28995 - DNA, 65 bp, Mus musculus
tctacggcgaagcttgtagaggccacagagggactacgtcatgaaatcgggaagaccaccgagcg

SEQ ID NO: 28996 - DNA, 65 bp, Mus musculus; identical to SEQ ID NO: 23716

SEQ ID NO: 28997 - DNA, 65 bp, Mus musculus
aacttcagaggcatggctatgagaaccccacctaccgcttcctggaagaacgaccttgaccccta

SEQ ID NO: 28998 - DNA, 65 bp, Mus musculus
gaggggctatgcagagaacagtcaagggaactggtttcttccactttctacatggaactccatcg

SEQ ID NO: 28999 - DNA, 65 bp, Mus musculus
aacaggctgctcaccttcctgcagtcttcctaaaatgaggcagagtctaggggacagcaaaggaa

SEQ ID NO: 29000 - DNA, 65 bp, Mus musculus
attttgtgtccagggaagaggcaagaagtacgacctgccttttgctttgtggtcagtggcttgtg

SEQ ID NO: 29001 - DNA, 65 bp, Mus musculus
gaagtagagttcaaggcaagggtgttcattccaaggccccatcccaaaagtcctctaatgtgtag

SEQ ID NO: 29002 - DNA, 65 bp, Mus musculus
atgaaagcctggagcgcttcaccggttcagatttggctaatgtcactttgacctacgtgatgcgg

SEQ ID NO: 29003 - DNA, 65 bp, Mus musculus
ctcatcgtagcattgagatggccagtatgtccgctctgcatcttctgcctcctctttgaaaggaa

SEQ ID NO: 29004 - DNA, 65 bp, Mus musculus
gctgggagaagatggcttaccagtccaaggctgctggaacaagtgatgcctctaacctgggactg

SEQ ID NO: 29005 - DNA, 65 bp, Mus musculus
tgctctgtctgaggaagctgatgacacagattctgagctggggtcaatgaaaccgctacatacat

SEQ ID NO: 29006 - DNA, 65 bp, Mus musculus
gggaaagtcctacttcctctgtagacccactatctgtgagtgacagccactgtagctgttcacat

SEQ ID NO: 29007 - DNA, 65 bp, Mus musculus
gacttctttctagggacagcatctctagggacagcatccctttctggcccatgcagtcattcata

SEQ ID NO: 29008 - DNA, 65 bp, Mus musculus
tacatcttcttcaccacttttgccccatgaggtgacatgtcaggcaatccctccaggtgatgcct

SEQ ID NO: 29009 - DNA, 65 bp, Mus musculus
attgtagcaaggtatggtgcggatggaagccttgcctgctctctggtcagcccagcgatccgagt

SEQ ID NO: 29010 - DNA, 65 bp, Mus musculus
gctttggtctctgggatctgggaagtacagtagggccaagacagaattccctctcctagaaacta

SEQ ID NO: 29011 - DNA, 65 bp, Mus musculus
tgatagcgagcactgccatccctcagtggcagatgagctcctatgcgggcgacaacatcatcaca

SEQ ID NO: 29012 - DNA, 65 bp, Mus musculus
cctcagaatagaccctattaagagggaagatgccggcgagtatcagtgtgaaatctcgaatccag

SEQ ID NO: 29013 - DNA, 65 bp, Mus musculus
ttcccttctaactccaggtcatagtcactgattccattgctgtaccctcattggacagctgggtg

SEQ ID NO: 29014 - DNA, 65 bp, Mus musculus; identical to SEQ ID NO: 3410

SEQ ID NO: 29015 - DNA, 65 bp, Mus musculus
taagaggtattccaggtgttaaaggtgatcggggacaaattggcttccctggaggtcgaggaaac

SEQ ID NO: 29016 - DNA, 65 bp, Mus musculus
ttcattgagaagagttacaagtccatctttgtgctgtctccccacttcatccagagtgagtggtg

SEQ ID NO: 29017 - DNA, 65 bp, Mus musculus
tccactggagacctccaacttctgcacttctatgcagggcagtgccagagccattactcagctct

SEQ ID NO: 29018 - DNA, 65 bp, Mus musculus
cagaagccaccgatgtccaaggttctgtcagcctgaatggctgccctgaccactaactctaccca

SEQ ID NO: 29019 - DNA, 65 bp, Mus musculus
acatcaatgggcgagtgctctactatgccacctgcaagtgaccttaagtcccaacctcagaccct

SEQ ID NO: 29020 - DNA, 65 bp, Mus musculus
agtttgacacggataaggacacggtgcagctggtgattactgaagcccagcaagctgatgccaga

SEQ ID NO: 29021 - DNA, 65 bp, Mus musculus
cggagccaaagggagttagacaatgttcaggctacaatagctgtggtagatgaagaggaagccac

SEQ ID NO: 29022 - DNA, 65 bp, Mus musculus
cctggactgtgacgctgtccttccccaatccctgcagacttcctatgtcttcctaggtattgttt

SEQ ID NO: 29023 - DNA, 65 bp, Mus musculus
atggcttccactggccttgaattcttgggcaggaccctggttgtgctaggctggctaggaacttt

SEQ ID NO: 29024 - DNA, 65 bp, Mus musculus
ctggagccctgaacctggcttcagagtagcaaagagtttcctccaagatgctgtaagggaagtct

SEQ ID NO: 29025 - DNA, 65 bp, Mus musculus
gtgctgtaatccccttacctcttctcagctcatgattgaaccagtgccacgctatgctgttgaag

SEQ ID NO: 29026 - DNA, 65 bp, Mus musculus
tcatcagatggcactccacctccctacaagtcactcctgagccaccaggatttcatcagcactgt

SEQ ID NO: 29027 - DNA, 65 bp, Mus musculus
tgaccctggtggacactgtggagttggccacatacaccatgcgcacctttgccctccataagagt

SEQ ID NO: 29028 - DNA, 65 bp, Mus musculus
caagcaactacaatgccagctgccagtatctccataactactcctactgctagagattccactga

SEQ ID NO: 29029 - DNA, 65 bp, Mus musculus
ggacaatgggctacgaagtgcaaatcacagctgccaacagactgggatattctgagcctactgta

SEQ ID NO: 29030 - DNA, 65 bp, Mus musculus
aagtggcacacactccaagcccacaaaagcaagcaccgcatcgtcctgactgtggacgggaattc

SEQ ID NO: 29031 - DNA, 65 bp, Mus musculus
gaaaagatggacctgcaggaatacgcggtttcccaggtgtaagaggccttcctggagcccagggt

SEQ ID NO: 29032 - DNA, 65 bp, Mus musculus
tgtgagctgaacctctccgtgactgactcatctgaaggccgagtagctgggactcttattggggt

SEQ ID NO: 29033 - DNA, 65 bp, Mus musculus
atgtgcacccagaaatcctatgagggtcaacagcatggcccatccttggctccatggcagataaa

SEQ ID NO: 29034 - DNA, 65 bp, Mus musculus
gcactgcctcacaatatggaaatgtgggcattaaagcaatgtactgcgaaaatgtttatgggcaa

SEQ ID NO: 29035 - DNA, 65 bp, Mus musculus
gtctacagttctgttcccaaagagatggctagcaaccattaacacttgataggaaaagcattcgg

SEQ ID NO: 29036 - DNA, 65 bp, Mus musculus
gcccaggatgggctcaggagcgggtcatctcagctggaagagaccacaagacccaccacctcagc

SEQ ID NO: 29037 - DNA, 65 bp, Mus musculus
cccatgcatctttcaggagagtgaagatagacaccagacccacacagaacaggactggagttcat

SEQ ID NO: 29038 - DNA, 65 bp, Mus musculus
atgactaccaagaagtgagtcctcggacccctgaagagcagttccagtcccagcagcaagttcaa

SEQ ID NO: 29039 - DNA, 65 bp, Mus musculus
gcctggaaatgtggagggcttgatatatgcgattctcattctcttgtcacgctatctgatgtgcc

SEQ ID NO: 29040 - DNA, 65 bp, Mus musculus
gattgtatcgttgtgtgatttaccatcctccgaatgaccctgttgtgctcttccatcctgtccgc

SEQ ID NO: 29041 - DNA, 65 bp, Mus musculus
catttggagaatgttgtgcaatatgcccacagccttctacacctgctcctgtgcttcctgatggc

SEQ ID NO: 29042 - DNA, 65 bp, Mus musculus
tacagtgagcagacttttcattcctctggttctgtggttgtctcggtgtgctagcctacacctcc

SEQ ID NO: 29043 - DNA, 65 bp, Mus musculus
tgggacaatccagtgggtctggttctgtgacaatgtgtgctatgatgccatttcaaagaggcacc

SEQ ID NO: 29044 - DNA, 65 bp, Mus musculus
tggggtcactcaacaccctcttcctcaaggacttcttggtgatactctcttgtcttttccagtta

SEQ ID NO: 29045 - DNA, 65 bp, Mus musculus
cggtttggatttgatcccctggtattccctgagtttagctggagaggatatgctccaatgacctc

SEQ ID NO: 29046 - DNA, 65 bp, Mus musculus
accgctgtgtgtctccctgcaggtcactggatacctgtccttgcgttctccagaaagactcagct

SEQ ID NO: 29047 - DNA, 65 bp, Mus musculus
tggcgaacatgtgcttcactcatcatttcagccaaagtcctgcctttccgtgcctttcctatcac

SEQ ID NO: 29048 - DNA, 65 bp, Mus musculus
gaacattgggtacccgtttatcgcttgagagaaccccttcgcagatggtagtaggaaaggccgca

SEQ ID NO: 29049 - DNA, 65 bp, Mus musculus
cctctgatcccagagtgggttatgctgctgtgtgtgagtcttacactcagttgacatcatctgac

SEQ ID NO: 29050 - DNA, 65 bp, Mus musculus
gacttctgggattttactgtcatctatgccatccacttccaagatgggttaacatcctttcttgc

SEQ ID NO: 29051 - DNA, 65 bp, Mus musculus
gaaatcagtctaaggaagcaatggtcttggaggtcttttccagtgctgactgcagcatgggcttg

SEQ ID NO: 29052 - DNA, 65 bp, Mus musculus
ctcttccagaacccagtgcaaagcgagttcagcagcgtgaccagcacgcacagcaccacgactga

SEQ ID NO: 29053 - DNA, 65 bp, Mus musculus
ggtagcaagaccatccagtgtgaactatatggtagcacctgtgacaggtaacgatgctggaattc

SEQ ID NO: 29054 - DNA, 65 bp, Mus musculus
gactgggaaaatcaagctccttggcatggtagagatggccttacttgggattggagtggtgatgt

SEQ ID NO: 29055 - DNA, 65 bp, Mus musculus
caagttcttgggacgtgtttcgttcaaagtcacagcacgagcctaggaataggatgtctccacag

SEQ ID NO: 29056 - DNA, 65 bp, Mus musculus
ctggtgcaaagaaaggacaatagacaaccagctgttcttcttcctggtggagcatgcagccagcg

SEQ ID NO: 29057 - DNA, 65 bp, Mus musculus
ggggatggagttaagatgctagttcctcagtgccttttagagtactgtgcaagcaatactcgcaa

SEQ ID NO: 29058 - DNA, 65 bp, Mus musculus
ctcttccaggtggacgctggctgtattccgtatttctgtcctgttcggagtgatcgtgaaatcta

SEQ ID NO: 29059 - DNA, 65 bp, Mus musculus
ccttcactgccaggtcaccatgcagctgcccaaactggtgctgacccatagaaaggagattccag

SEQ ID NO: 29060 - DNA, 65 bp, Mus musculus
tcaggaatgttccctggaatctgatgtggcagaggcttcttcctacctggtggaaacaggacaca

SEQ ID NO: 29061 - DNA, 65 bp, Mus musculus
cgtctacagcaacgatagcatccatccctacacaccctttgaggtcaagatccgaagctacaatc

SEQ ID NO: 29062 - DNA, 65 bp, Mus musculus
cccactcacccaatgctatcggaatagactcaagccaacacaatttgacctcctgactcacatgc

SEQ ID NO: 29063 - DNA, 65 bp, Mus musculus
gatgtgatactgcgaaggaacacagctggaagcctgggcttctgcattgtgggaggttatgaaga

SEQ ID NO: 29064 - DNA, 65 bp, Mus musculus
atacacatactcagagtggcacagtttcactcaaccccgacttggtgaaaaattgcatgtgtgta

SEQ ID NO: 29065 - DNA, 65 bp, Mus musculus
ctaaagtggagcaacaggaggagatcctaaggcccgacaccactgatcaagggacccctgagttt

SEQ ID NO: 29066 - DNA, 65 bp, Mus musculus
agcgcatcagcaagcttgagaggaacgtggaagagcttaagcgtaaagctgcccagaactctggg

SEQ ID NO: 29067 - DNA, 65 bp, Mus musculus
cacttgggggatatccaaccccctggagcaactgaggtctctctttgtaggagagtgggtcagta

SEQ ID NO: 29068 - DNA, 65 bp, Mus musculus
tactagtgacagtggtgctgtttgcagctctgaggcggcagcgaaagaaagagcctttgatcatt

SEQ ID NO: 29069 - DNA, 65 bp, Mus musculus
aggcatcctgctctgtgtcaacatcccagtatgcagagactttccccgttgcattgagaccccta

SEQ ID NO: 29070 - DNA, 65 bp, Mus musculus
gccaagaatgctgtcagcaatttgtcagtctctgtttcgacccagagtctctgcaaaggggttct

SEQ ID NO: 29071 - DNA, 65 bp, Mus musculus
atcctagttccaggtgtaacttggtggccagaattgagaagagtgccaaatgaccacccgtcagg

SEQ ID NO: 29072 - DNA, 65 bp, Mus musculus
ttgcgagacttcctgttggtctacaatcggatgacagaactgtgtttccagcgctgtgtgcccag

SEQ ID NO: 29073 - DNA, 65 bp, Mus musculus
gacaaaaggcgaaatgaaccaggaaaacacaagacacacaagagaaaagacagtaggagcacaga

SEQ ID NO: 29074 - DNA, 65 bp, Mus musculus
atcagcctagcatcttgacccatatctgtactattgcagatggtcactctgaaggacaccctgcc

SEQ ID NO: 29075 - DNA, 65 bp, Mus musculus
ccataccttgtagcccatcgctgttacctggagccaaggacgttagaccaagatgttgcatgaac

SEQ ID NO: 29076 - DNA, 65 bp, Mus musculus
caccatcacctctaccagctcctccatcaccagctccatccctgatacagagcgcctagatgatt

SEQ ID NO: 29077 - DNA, 65 bp, Mus musculus
tctgactcttcccatcgaggtccctgtcttgtgaaaagccaaggccacgggaaaaggccaccact

SEQ ID NO: 29078 - DNA, 65 bp, Mus musculus
ctgccgcccaccacagagctagaggagggccttagaaacggagtctaccttgccaagctagggaa

SEQ ID NO: 29079 - DNA, 65 bp, Mus musculus
atgccttatgtggtgtttattgctgctccagagctagagaccttgcgtgccatgcacaaggctgt

SEQ ID NO: 29080 - DNA, 65 bp, Mus musculus
tagcttatctagggacgtgcttggaggagaacactctgagcatcttcctcgaatatgtcgctggc

SEQ ID NO: 29081 - DNA, 65 bp, Mus musculus
gaagacttagaaagggagcaacagtggttggatgaacagcagcaaatactggacactcttaacgt

SEQ ID NO: 29082 - DNA, 65 bp, Mus musculus
gcagctgcagacttgaaacagttctgtctgcagaatgctcaacatgaccctctgctgactggagt

SEQ ID NO: 29083 - DNA, 65 bp, Mus musculus
ctccagaccccatgccttatgaaccctgtctgcctcagtatccacacataaacggcagtgttaaa

SEQ ID NO: 29084 - DNA, 65 bp, Mus musculus
acaagcaggagttcctggacaagccagaggatgtcttgttgaagcaccaggccagcatcaatgaa

SEQ ID NO: 29085 - DNA, 65 bp, Mus musculus
aggaaggctcaagctttgaaggcctagagagcagcacggctagcagcatggaattggaagaactt

SEQ ID NO: 29086 - DNA, 65 bp, Mus musculus
gacagcatcgtgctggagctggatcgggagatgagcaggagtgtggatgtgaccaataccacttt

SEQ ID NO: 29087 - DNA, 65 bp, Mus musculus
cgatccaactacattccacagtggtaaaaggacgttgattgttcagggaactcgtgggtctactg

SEQ ID NO: 29088 - DNA, 65 bp, Mus musculus
gctgcgtagacgtagtgaaagtgtgctgataatgctacaattgaggatggtgtttctttctcgga

SEQ ID NO: 29089 - DNA, 65 bp, Mus musculus
ctgaagatattgtctctcacccaggggccatctcaaggtctccagttctccatttacagaggaga

SEQ ID NO: 29090 - DNA, 65 bp, Mus musculus
aacaagaactcaagcgcagatgaagtggtggtacccctggataacctagggaaccccaactgtga

SEQ ID NO: 29091 - DNA, 65 bp, Mus musculus
atgtcaacgccaatcgaggtcctctgcaaaggctacccctccgagttctcaacatacctcaactt

SEQ ID NO: 29092 - DNA, 65 bp, Mus musculus; identical to SEQ ID NO: 23716

SEQ ID NO: 29093 - DNA, 65 bp, Mus musculus
cagtggtggctgtgagagttacctagttaacctctctctgaatgacaatgacggttccagtgggg

SEQ ID NO: 29094 - DNA, 65 bp, Mus musculus
gggaactgagatcctgggttctggggtctctatgaaatctgttcacagtgtcttcctcacttcct

SEQ ID NO: 29095 - DNA, 65 bp, Mus musculus
caaacatgccaagaaaggagtttgtatctgggagtgtattgacaagatgcacacacggagtccca

SEQ ID NO: 29096 - DNA, 65 bp, Mus musculus
gagggtgaccctgatgcttttggaccagagcggcaagaagaaccatattgtggagaccttcaaag

SEQ ID NO: 29097 - DNA, 65 bp, Mus musculus
tttaaagagcaggagctcaaagaacgggagagacgtctcaagatgtgggagcagaagctgacgga

SEQ ID NO: 29098 - DNA, 65 bp, Mus musculus
ctcctccagcactgccaccatgctctgatcctgcacctgacaccgttgatctgactctgcagcct

SEQ ID NO: 29099 - DNA, 65 bp, Mus musculus
cagtaagctgtctgttatccatcgagacgtcaagccttctaatgtgctcattaacacactgggcc

SEQ ID NO: 29100 - DNA, 65 bp, Mus musculus
tgtgaagagcaacacacatgatgactgccaagtcaccaaccccagcacaggccacctgtttgacc

SEQ ID NO: 29101 - DNA, 65 bp, Mus musculus
acccagggactcctgaaagtcctgcacaagcagtgtagccacaagcaatatgtggagttagcaga

SEQ ID NO: 29102 - DNA, 65 bp, Mus musculus
ataaaggtggttggcatcaatgtcagaccagacaggtggcgttcctggaagcatggcatggaaac

SEQ ID NO: 29103 - DNA, 65 bp, Mus musculus
ttctgtgtgaaatgagtaggatgcctccaggacatgtacgcaagcagccccttgtggaaagcatg

SEQ ID NO: 29104 - DNA, 65 bp, Mus musculus
gatggtgatgatggctgacgacccagagcatccagacctctttctgctgactgactccgagaaag

SEQ ID NO: 29105 - DNA, 65 bp, Mus musculus
gaagccagcctatcaagcaccacagcccaggacaaaggagtgggatgttgcataggaatactttc

SEQ ID NO: 29106 - DNA, 65 bp, Mus musculus
gaatggtttggtttcctttcaccagttgtagaaagctgtatgctgactcatctcattgctgggag

SEQ ID NO: 29107 - DNA, 65 bp, Mus musculus
tctgtgagagatgggacaggtcctccaggagaggagtccacgtgcttgtgcttcgccttaataga

SEQ ID NO: 29108 - DNA, 65 bp, Mus musculus
gaactaggaagccctcatccgaccaatgtctgtaaacgctctgaggtcttccttcaggatgtatc

SEQ ID NO: 29109 - DNA, 65 bp, Mus musculus
gcagagcctccttgtggggacagctacccacttcttacttgcccatctatacgcccaatgtagta

SEQ ID NO: 29110 - DNA, 65 bp, Mus musculus
cgacccagggaaaccttaactcatcagcccaggactaccgggcactctacgactacaccgcacag

SEQ ID NO: 29111 - DNA, 65 bp, Mus musculus
aagttcggccagattgtcaacacgctggacaagatgatccgaaaccccaacagcctcaaagccat

SEQ ID NO: 29112 - DNA, 65 bp, Mus musculus
tctctcgagtccctcaaggatggtgtcttcactactcattctgacgtctggtccttcggaattcc

SEQ ID NO: 29113 - DNA, 65 bp, Mus musculus
cactcagagaccaagcagacttccagaaccagaacaaagctctgtagccttgtgtctacacatcc

SEQ ID NO: 29114 - DNA, 65 bp, Mus musculus
accttcacagaaacccattcttggtggttcctccggtgcaagggggttgcttcctcgagactcca

SEQ ID NO: 29115 - DNA, 65 bp, Mus musculus
atcgatatccacagcgacttggctgctaggaacatcttggtcaacagtacggtctgcaaggtgtc

SEQ ID NO: 29116 - DNA, 65 bp, Mus musculus
tggagctacttccgagcctcctggtccagagcagcgagttgtgcggagagcggcagaggttccag

SEQ ID NO: 29117 - DNA, 65 bp, Mus musculus
tctaggtttctttgccaacagccagatggagctctctatggatcgcctcactttgatcctgaggc

SEQ ID NO: 29118 - DNA, 65 bp, Mus musculus
cagtttatccagctgtcatgtctggttcagtatctacagactgtgtgtcctctcattaccacatg

SEQ ID NO: 29119 - DNA, 65 bp, Mus musculus
ggcgacacgatcttcggcaagatcatccgcaaagaaatccccgccaagatcatcttcgaggacga

SEQ ID NO: 29120 - DNA, 65 bp, Mus musculus
gtgaaggacactctcatccccgagttgttgagctacccaaaacagaagagggccttggattcaat

SEQ ID NO: 29121 - DNA, 65 bp, Mus musculus
attcctcacgtccctactgccaaatttcctcagtgttgtaggcacttgccctgaactctctcagc

SEQ ID NO: 29122 - DNA, 65 bp, Mus musculus
caaggagtatttctacaccagcagcaagtgctccaatcttgcagtcgtgtttgtcactcgaagga

SEQ ID NO: 29123 - DNA, 65 bp, Mus musculus
gaagaaacactggtttgtcctggcagatcagagcctgagatactacagggattccgtggctgagg

SEQ ID NO: 29124 - DNA, 65 bp, Mus musculus
ttagaatccattcttctctagggcaacgttttcagctccagcagctgtgaagtggaacggaccgg

SEQ ID NO: 29125 - DNA, 65 bp, Mus musculus
attaccatgagcaagctgcctccattctaaagcagcagagagggactgtggccttgactgtgctg

SEQ ID NO: 29126 - DNA, 65 bp, Mus musculus
cctgacgcagatgggaataacgttgccagggcaccagaaacgaattctctgcagtattcaaggat

SEQ ID NO: 29127 - DNA, 65 bp, Mus musculus
tgagatgtaagtgcgtagcagtctctcaggccttctagcatcatgcagaaagccatccggcttaa

SEQ ID NO: 29128 - DNA, 65 bp, Mus musculus
acttgagtttggagccagaatgccaggccgtgaagcaaatagcagttccatgctgtcttgccttg

SEQ ID NO: 29129 - DNA, 65 bp, Mus musculus
gaatcaaccaatagaagtgacagcattatactctttcgaaggacaacagccaggagacttgaatt

SEQ ID NO: 29130 - DNA, 65 bp, Mus musculus
cccacctgctacttggcacatgacaacacagtttgtactgaaggtatgtgaagggtagctagtag

SEQ ID NO: 29131 - DNA, 65 bp, Mus musculus
gatgaacacatgagagttatgtcagagaagaaacatggtgcagatagaagcgggtcaacagctgt

SEQ ID NO: 29132 - DNA, 65 bp, Mus musculus
tctggggagccttggagctgctcatcttcttctcggtggtgaatgtgtcagtggggcttctgggg

SEQ ID NO: 29133 - DNA, 65 bp, Mus musculus
agaggacacgttgtagaggagagggttgaccacagagctgaggtagaagaaggtatcagagaagg

SEQ ID NO: 29134 - DNA, 65 bp, Mus musculus
agctcggacagtgcagtggtgcacatcagcaacttgtatttcttcggtgtttggcacgagcactg

SEQ ID NO: 29135 - DNA, 65 bp, Mus musculus
gtgttaagtccagtccttcgttgctgtttgctgtcattgtgggcgtgccgctgctaattacaaag

SEQ ID NO: 29136 - DNA, 65 bp, Mus musculus
gagatgctctgatacagaaatctcagataaccgagccagacccagatgtcaagaagaaaactgaa

SEQ ID NO: 29137 - DNA, 65 bp, Mus musculus
cagagagcacagacgattgcctggcatggaagtttacactgcaggattccagaacaaacacagct

SEQ ID NO: 29138 - DNA, 65 bp, Mus musculus
ttcttacccaccctgtcagcagcgcctttctgagcagagaccagggaacaggcagtcagggacct

SEQ ID NO: 29139 - DNA, 65 bp, Mus musculus
cctagttagagggtaggttttggacttggctgggtgtggtcacagcaatctcccagtgcctttta

SEQ ID NO: 29140 - DNA, 65 bp, Mus musculus
gacagctggtcacgaagagctggtgcacttcctaccaccaagagaatgggtttactctcatcaaa

SEQ ID NO: 29141 - DNA, 65 bp, Mus musculus
gaaatccatactgcaactgggtcctgcaacataaaggaagttgactccatttcccaagcccaggg

SEQ ID NO: 29142 - DNA, 65 bp, Mus musculus
actgtataactctcacttgtgtacatacgagagaccactaccattggggtagacatccctgcctc

SEQ ID NO: 29143 - DNA, 65 bp, Mus musculus
acacacatttcagcctgtgtacctgtgactgtgatgtccgcatcttgtgtcagtggtgtccttga

SEQ ID NO: 29144 - DNA, 65 bp, Mus musculus
catttgaccttagccaacctgctggagactctgatcgtcatgccactggatgggatgtggaatat

SEQ ID NO: 29145 - DNA, 65 bp, Mus musculus
acctccatcctgtgcctcccagttctcccaagcgtcaatctttgctgcactgtcagcccaagctt

SEQ ID NO: 29146 - DNA, 65 bp, Mus musculus
aggacagcattcagcagcagcaaaacgaagcagtctgggtctctgaaggaaagatggaagggatg

SEQ ID NO: 29147 - DNA, 65 bp, Mus musculus
acagccacagaggagcaaatacaagcctggattggaggtcctggagcaggcaatgggacaagtag

SEQ ID NO: 29148 - DNA, 65 bp, Mus musculus
aattactgggctcagacatggagaaggaaccagctgttctgtgggcagaggtgacgctgcaggta

SEQ ID NO: 29149 - DNA, 65 bp, Mus musculus
tctgttctcctcaagccatcccagcaagtcccctgtccagccccacatcaacctcagtgcaatat

SEQ ID NO: 29150 - DNA, 65 bp, Mus musculus
cagctacagcctgtatggcatctgccgtgaggcctgccagttgccagaaccgctctttaagtttt

SEQ ID NO: 29151 - DNA, 65 bp, Mus musculus
tgtgcagaggagttgggtcactgggacgccctggcagtcatgtccggtgatggtctgatgcatga

SEQ ID NO: 29152 - DNA, 65 bp, Mus musculus
cagggcaagctcatctgtgcagaccccaaagacaaacatgtgaagaaggccatcagattggtgaa

SEQ ID NO: 29153 - DNA, 65 bp, Mus musculus
gcacgactctagtcctgtaatagcatctcgcctgatgtcaaagctgcaagtggacgtggtagata

SEQ ID NO: 29154 - DNA, 65 bp, Mus musculus
ttccagcccaagatggagcagacagattcctgtcctactgaaaagctaacccagccacagagaag

SEQ ID NO: 29155 - DNA, 65 bp, Mus musculus
ccaaggagaagccacaagacatctggccaatggagatgcagcctattgtcacagacatggtgaca

SEQ ID NO: 29156 - DNA, 65 bp, Mus musculus
gtaagtatttgtggattctatcttgggaagggtagagttagtggagttttgaggtctcactaccc

SEQ ID NO: 29157 - DNA, 65 bp, Mus musculus
gaaagtctcaaggctggaggagcatgaggcctttcatccctttgtattctgagttctccttcctg

SEQ ID NO: 29158 - DNA, 65 bp, Mus musculus
ctgggatgataaaaggcttaggggatctgcttttgcctgataaccctggttgtttgcatttcaca

SEQ ID NO: 29159 - DNA, 65 bp, Mus musculus
ccagtgcagtcctgtaatctgcagcagggagcacgtcctctgctctctgctatgtggttattcta

SEQ ID NO: 29160 - DNA, 65 bp, Mus musculus
tgagagcggtgagttacgattgggccctatggctgcctttctcatttgacagctctgttggagta

SEQ ID NO: 29161 - DNA, 65 bp, Mus musculus
gatatggacctaggggagctattgcgccacgacaggaggaagttctcagatgttgcattgatgta

SEQ ID NO: 29162 - DNA, 65 bp, Mus musculus
tccagacagaagcacagtaccggtttatctacatggctgtccagcactacatagagacgctgcag

SEQ ID NO: 29163 - DNA, 65 bp, Mus musculus
ctggtaaaggcggcccagaaagctgcagccttcgaagaccaggagaatgagacggtggtggtgaa

SEQ ID NO: 29164 - DNA, 65 bp, Mus musculus
tgccagcttctcctgcctcagtattcaacccacccttgcagcagcctcagacttcccgggtgctg

SEQ ID NO: 29165 - DNA, 65 bp, Mus musculus
gcatgcttacggtctccaatagctgctgcttgaacaccttgaagaaagagcttcccctgaagttt

SEQ ID NO: 29166 - DNA, 65 bp, Mus musculus
aagcgagagagcagcaccctgatatgtcggtcacaagggtggtagtgcacaaagaaacagagttg

SEQ ID NO: 29167 - DNA, 65 bp, Mus musculus
tggctttctcaacatcaacttcaagaaggatatcaaggctctggtgctgacctgccattgcaggt

SEQ ID NO: 29168 - DNA, 65 bp, Mus musculus
agaaccttctgcttgacaaggacttcaacatcaaactgtctgacttcggcttctccaagcgctgc

SEQ ID NO: 29169 - DNA, 65 bp, Mus musculus
ccagcccctactgtcgtaccagtagaaacctcatcttgggtacaaggaaggatagttctgtcact

SEQ ID NO: 29170 - DNA, 65 bp, Mus musculus
aagatccattcgtaggatacgtgctgactcttaggtcatgcttgtgctactgcagcaagaccgcc

SEQ ID NO: 29171 - DNA, 65 bp, Mus musculus
ctgctgagaagggtgtagccccgtcacaacaaaggtaccatcccttggctggctcccagcccttc

SEQ ID NO: 29172 - DNA, 65 bp, Mus musculus
aggctgtggtacctgaccttgttgaaatcaaggcccagcactgtactacagtcctgtttacagat

SEQ ID NO: 29173 - DNA, 65 bp, Mus musculus
atatcataggtgcacagcctctctgcagccaactggcaggactttctcaaggacagaagaaactc

SEQ ID NO: 29174 - DNA, 65 bp, Mus musculus
tgaaggaactggacttattccacatctacagtcctgtggggaagatgagtgtctgtgaccctggc

SEQ ID NO: 29175 - DNA, 65 bp, Mus musculus
ctgtctgagtccagcagctccctaggaaaagtacctatccaggccttgggaaattacaggggcca

SEQ ID NO: 29176 - DNA, 65 bp, Mus musculus
tcataaaagggcaggcaggagcaggctgagaagcagcctgtgcctcccagagactgactcagaga

SEQ ID NO: 29177 - DNA, 65 bp, Mus musculus
aaaccatcaaaccgatgctgacggacctgaacacgtacctcaataaagccatccctgatacacgc

SEQ ID NO: 29178 - DNA, 65 bp, Mus musculus
cagtctcgttctttccggatccttgcccagatcactgggactgagcatctgacagaatctgaaaa

SEQ ID NO: 29179 - DNA, 65 bp, Mus musculus
agcaaggacgctcaaggaaaagttcgggaacacccaccatgaatggaggcaaagtcgtgaatcaa

SEQ ID NO: 29180 - DNA, 65 bp, Mus musculus
ttaaaactcccagtaaagccacagttctccgagcacccaagtctgctccagccgtctcttaaaac

SEQ ID NO: 29181 - DNA, 65 bp, Mus musculus
ttcgaatggcctgggtagtccttgactgcagtgggaacgcaccctttgcagccatgaaagctaaa

SEQ ID NO: 29182 - DNA, 65 bp, Mus musculus
cgaagcaactcgaagaccatgacagaaagctccagcttctactctaacattctggcctaagcagc

SEQ ID NO: 29183 - DNA, 65 bp, Mus musculus
aaaaggcggtggaactcctgaaggctgcacagggctcagtgaaactggtggtgcgctacactcct

SEQ ID NO: 29184 - DNA, 65 bp, Mus musculus
cagcatacttggaactgcaaaactggtcttgcgtgccagagcacaaacgagagtgtgagagaaag

SEQ ID NO: 29185 - DNA, 65 bp, Mus musculus
gggccagtctaaaagcagagcaccttcactctgacattttcatccatcagttgccacttcccaga

SEQ ID NO: 29186 - DNA, 65 bp, Mus musculus
tggtgaaggagcagtcccagccttgtgctgagaacaccgtgctttccagtggtctcaccgcagca

SEQ ID NO: 29187 - DNA, 65 bp, Mus musculus
tggatgtcgcgtcctggtttaaggatgtcatggcgaagaccgagtccccaaggactagtggagtc

SEQ ID NO: 29188 - DNA, 65 bp, Mus musculus; identical to SEQ ID NO: 23716

SEQ ID NO: 29189 - DNA, 65 bp, Mus musculus
agcctgtgcgtgccagtcgaaacaagcggcccacctttctgaagatcaagaagcccctgtcctac

SEQ ID NO: 29190 - DNA, 65 bp, Mus musculus
ctttacttctctttgggaaagtgaaccacaaagggaccatgagactctgagggtcacctccctgc

SEQ ID NO: 29191 - DNA, 65 bp, Mus musculus
tggtgctgggatcctatgccactccccactccatctctaaacagagtgagtgagactctcattat

SEQ ID NO: 29192 - DNA, 65 bp, Mus musculus
ggtggagtgcatcgccatgagcaacagcatgatcaatacgctctgctttgtgactgtcaggaata

SEQ ID NO: 29193 - DNA, 65 bp, Mus musculus
caccagcagagccatctaatccttggatcagcgatgacatcaccttatgggacatagagatgagc

SEQ ID NO: 29194 - DNA, 65 bp, Mus musculus
agggatatttgctgcttggcaagagctgctagtggttttcctgagagagaggtggcctctgaggg

SEQ ID NO: 29195 - DNA, 65 bp, Mus musculus
acacctgtggtccatctactctccgtcttagccttaacctcagcctccatgcaaagcctaagcct

SEQ ID NO: 29196 - DNA, 65 bp, Mus musculus
aacgcttgggtcttcctgctgatctacatcatccctgagctgagcatactctacaggtcatgtag

SEQ ID NO: 29197 - DNA, 65 bp, Mus musculus
ctgtacctgcgtaagaagggtggtcctactgccaaagtcaagcaaggtcacatcagcttcaaagt

SEQ ID NO: 29198 - DNA, 65 bp, Mus musculus
gcgtgctgtagtgaaccttttgtatgatagcgatcctgtttcaacgttgttacactcaagccaag

SEQ ID NO: 29199 - DNA, 65 bp, Mus musculus
actgtcggagggcttatgtttcagaacaggaaagggcttgttccagttaacgtctacctccagcg

SEQ ID NO: 29200 - DNA, 65 bp, Mus musculus
gagctttggcagctacggaagaaccaaaatcacgcaaacatcacagagagacagtgcagtgtagc

SEQ ID NO: 29201 - DNA, 65 bp, Mus musculus
ggagccaaggatgcacagttaaccaagagtgaagaggaagacttggaagttggacctggattaga

SEQ ID NO: 29202 - DNA, 65 bp, Mus musculus
ggacctgtttaacagtgtgatgaacgtgggtcgcttcacagaggagatcgagtggctgaagtttt

SEQ ID NO: 29203 - DNA, 65 bp, Mus musculus
ggggaatcaagccatttcctgtcgtgtagatgtgaagcactttccgttctgaaccatgctgcggt

SEQ ID NO: 29204 - DNA, 65 bp, Mus musculus
tcagcacaactaaacttcaggacttgctacaagcacaaggaaacagcagtgcatcagggagctcg

SEQ ID NO: 29205 - DNA, 65 bp, Mus musculus
atctccagggctttcgcagtgcaatttgatggtcctgactgggaacggactccatgctccaccaa

SEQ ID NO: 29206 - DNA, 65 bp, Mus musculus
tctctagaggaacagaacgccacagggattaggagtactgtctatacacatggagagtttagaca

SEQ ID NO: 29207 - DNA, 65 bp, Mus musculus
atcatgccggaaccaggtcaggaggagacggtgagaattgttgctctggatcgaagtttccacat

SEQ ID NO: 29208 - DNA, 65 bp, Mus musculus
ccatacggtggtattggctctcttaacctcacatgcacgaaggctttgatggacgcgtgtgcact

SEQ ID NO: 29209 - DNA, 65 bp, Mus musculus
cgaggccagtagctagaactgttttctgtcagcaatgtcaagctgcagaaggatgatctctacag

SEQ ID NO: 29210 - DNA, 65 bp, Mus musculus
caagagctgccagaccaccacaggtaatggaaaccctgtcgaatgctctcaatcagaaagttcct

SEQ ID NO: 29211 - DNA, 65 bp, Mus musculus
acccacctctccctgtctttctgtctgtctgtctctcaacatctaactgcagcagaaattagact

SEQ ID NO: 29212 - DNA, 65 bp, Mus musculus
aacaactctctgctgtccaggagccaaagccgagaaggtagatggcaggaggagaagcccctgaa

SEQ ID NO: 29213 - DNA, 65 bp, Mus musculus
aggacatccgaaagcggaactacgtgcgggatgatgcggttttcatccgtgcctctgtcgaactg

SEQ ID NO: 29214 - DNA, 65 bp, Mus musculus
cgtatcgacatgtacgccatgggcctggtgctgtgggagctcgtctctcggtgcaaggctgcaga

SEQ ID NO: 29215 - DNA, 65 bp, Mus musculus
aggctcatggagctaacctgcgccatctacaggccaagaagaagtttgtgaaggccatggtactg

SEQ ID NO: 29216 - DNA, 65 bp, Mus musculus
caatcatcttctgctttcctggctcattgtgcacctggaccacgtcattgcgaaggagctggaaa

SEQ ID NO: 29217 - DNA, 65 bp, Mus musculus
tcttaaagctggttaagtcctatcactggatgggactggtccagatcccagcaaatggctcctgg

SEQ ID NO: 29218 - DNA, 65 bp, Mus musculus
atacaggcattgaacagtgcaatggctcctcctcaagttccattccaggcatccagtaggctctg

SEQ ID NO: 29219 - DNA, 65 bp, Mus musculus
accctgcgcttgaactcctgcctgcctccagcttattgcttgaaattatggggtgaggtggtgat

SEQ ID NO: 29220 - DNA, 65 bp, Mus musculus
agagggaacaaagatgctgccatcaattccttgctgcaaatgggtgaagagtcctagacccgcct

SEQ ID NO: 29221 - DNA, 65 bp, Mus musculus
tttatggggtttcaagtctgccagagtcagaaatcagctctaactcgccagtgaagagatctggc

SEQ ID NO: 29222 - DNA, 65 bp, Mus musculus
ccacacagaagtgggtcagtgagtacatggagatccttgaccagaagtctcaaattctgcagcct

SEQ ID NO: 29223 - DNA, 65 bp, Mus musculus
gcttgcacattgacccagacaaaaggcccttctgtgctgaccttctgcgccatgacttctttcaa

SEQ ID NO: 29224 - DNA, 65 bp, Mus musculus
tactgtggtcaacttcttcgtcacagactctgtggagcctgagatacggcagcatccacttggtt

SEQ ID NO: 29225 - DNA, 65 bp, Mus musculus
tgacaccctctgcaggtttgaaagtgttctggacctgaagccatctgagtcagtgggtacaggaa

SEQ ID NO: 29226 - DNA, 65 bp, Mus musculus
aagctgcagacctgctcgacaagatgctggagctggatgtggacaagcgtctgaccgctgctcag

SEQ ID NO: 29227 - DNA, 65 bp, Mus musculus
caggccagcaaaatgtgtgctgagaagtctcctgcagaaatgaagagcatttttcaaaaatatgc

SEQ ID NO: 29228 - DNA, 65 bp, Mus musculus
tattcttacctatggtggaggctccctttcccatgtcgctgccaccctctatggaaactgaggag

SEQ ID NO: 29229 - DNA, 65 bp, Mus musculus
catggtggcgttgtgaaaggggatgagatcatggccatcaatggcaagattgtgacggactacac

SEQ ID NO: 29230 - DNA, 65 bp, Mus musculus
ctgcccacacgtctatcttggattactatgagccagtctttccttgaactagaaacacaactgcc

SEQ ID NO: 29231 - DNA, 65 bp, Mus musculus
tgggagaccacgacccatacaagcacactgcggggtatgtgtcggagtaccggtttgttcctgat

SEQ ID NO: 29232 - DNA, 65 bp, Mus musculus
agttccagaaacggggataggagcaagtggccctctaggatgctggatgctgagaaagtgccaga

SEQ ID NO: 29233 - DNA, 65 bp, Mus musculus
actcgctatgaggccgtctccttcatggacgtgaacagcacctggaggaccgtggaccacctctc

SEQ ID NO: 29234 - DNA, 65 bp, Mus musculus
ctgccattgtacgcaccatgcagaatacaaatgatgtagagacagctcgttgtactgctgggacc

SEQ ID NO: 29235 - DNA, 65 bp, Mus musculus
acaggtggtgcaggtatacaaggagagtccacagaccctaaactccgctgctccacagagaggtg

SEQ ID NO: 29236 - DNA, 65 bp, Mus musculus
ttatcacctttccttgtctctcgggtccctataggtcccttgagttctctaaccagcacctctgg

SEQ ID NO: 29237 - DNA, 65 bp, Mus musculus
tggacaagccctcagtggtgtccttgcagaacctcatcgtaagagacatagccaaccaggcgaaa

SEQ ID NO: 29238 - DNA, 65 bp, Mus musculus
taactgatacgcttgctacaattcagctaatggaacccgaaggaagaacaacagaagttggagcc

SEQ ID NO: 29239 - DNA, 65 bp, Mus musculus
ccggctatgacaccagccatgtcttttgctgacagtgccatttgctatgatgctcaaacaggtca

SEQ ID NO: 29240 - DNA, 65 bp, Mus musculus
tgagcaagaccttcccttctgcaaaggagatgtgctcaccatcgtggctgtcaccaaggacccca

SEQ ID NO: 29241 - DNA, 65 bp, Mus musculus
gaggcaaagacacgacaaaacacctgcacctgaacagcagaagaaatgtgtcaagtccccttcgc

SEQ ID NO: 29242 - DNA, 65 bp, Mus musculus
gaaatggccgtcatcgggctgaagtgactctaagggctccagacctctgctcctgtctttcactt

SEQ ID NO: 29243 - DNA, 65 bp, Mus musculus
acgactctccatgaaaccgccagttcacggaactactcaaccaatcacgagccctgaagggtaca

SEQ ID NO: 29244 - DNA, 65 bp, Mus musculus
gaccaacactgaaccagactgtaatatctccaggaccgaatcactctctctgtccagtactctgc

SEQ ID NO: 29245 - DNA, 65 bp, Mus musculus
aactcagtggttctttaagggagccctgtaaggtagttcttgcccatcttggtcttagacattcc

SEQ ID NO: 29246 - DNA, 65 bp, Mus musculus
ggctttgattctcttgtattccttatattcctcaagcaccggaacacgatcctccttctgggcat

SEQ ID NO: 29247 - DNA, 65 bp, Mus musculus
cgcagctgaggaacaaccaccttcaaacacacatagagaaacggaacagatggaaacacctgtac

SEQ ID NO: 29248 - DNA, 65 bp, Mus musculus
ggaccaagaaggggaaccgagtgtcgcctaccatgaaggtaacccacttccttcctagactgtga

SEQ ID NO: 29249 - DNA, 65 bp, Mus musculus
gtgggagctgtctggggtaacctggctctaggaccaggtggaaaaagcaccttggctggcccagc

SEQ ID NO: 29250 - DNA, 65 bp, Mus musculus
tttacctttctcctggagctggactcttcatttcctcaggacggactggctggacattgttcctg

SEQ ID NO: 29251 - DNA, 65 bp, Mus musculus
agatcgaagagctgcagatcgccttccaggagtttgaccgagaccgggacggctacatcggctac

SEQ ID NO: 29252 - DNA, 65 bp, Mus musculus
tgggaaagaaggtggctgtggctgactatgtggaaccttctccccgaggcaccaagtggggcctt

SEQ ID NO: 29253 - DNA, 65 bp, Mus musculus
ggcctctcaacagctaacatagggtttggaagcagcattagatcctttgtagcaatctggtctac

SEQ ID NO: 29254 - DNA, 65 bp, Mus musculus
gtttactagcgaagtgctttaaacctgcccttccatatcttgatgtggatatgatggatatctgt

SEQ ID NO: 29255 - DNA, 65 bp, Mus musculus
gtgggtcgcagagttcatgtcaaaccagtgctagatgtttctgagtttctttccgagctgatgac

SEQ ID NO: 29256 - DNA, 65 bp, Mus musculus
ggattcctaccgccgcttcctcaagtctcgattctatcttgacctgaccaatccttccagctgcg

SEQ ID NO: 29257 - DNA, 65 bp, Mus musculus
ttcgtgcaggcttcaagagagcatttcgctggtgtcctttcatccaagtctccagctacgatgag

SEQ ID NO: 29258 - DNA, 65 bp, Mus musculus
gttgaaattcctgtctgatttgcccctggtatctcagagctacagctccctaaggtgcctttggc

SEQ ID NO: 29259 - DNA, 65 bp, Mus musculus
gactcaaggtacagaagatggagacatgcgcttggttaacggggcctcagccaatgagggccgcg

SEQ ID NO: 29260 - DNA, 65 bp, Mus musculus
cctgcctttcttgatgtccaatgatggggcctggaatgtatgagctagcaaggcttcttcagctt

SEQ ID NO: 29261 - DNA, 65 bp, Mus musculus
tgtgagattaagcagccggtgtttggtgcgaacttcattaagggaatagtgaaggctgaagcagg

SEQ ID NO: 29262 - DNA, 65 bp, Mus musculus
cagagctggaaagccgggctccggaccagaaactcttagaggaagacggtaccatcatcacatta

SEQ ID NO: 29263 - DNA, 65 bp, Mus musculus
tcattagttccgacacttgtgaaactccgagacgtgccgtggtctcagcaatgcacctgttttat

SEQ ID NO: 29264 - DNA, 65 bp, Mus musculus
ggacctctccctgtccctaagcggataccagatgatcctgattactctgtggttgaagattacag

SEQ ID NO: 29265 - DNA, 65 bp, Mus musculus
tgcctctcaagcccttgtctgaatggagccacctgcgtggatgccttggacactttcacatgctt

SEQ ID NO: 29266 - DNA, 65 bp, Mus musculus
cttttatggccctgcttcacagggagaagagtggagcacaggcgaacctcctcagtctgggaggt

SEQ ID NO: 29267 - DNA, 65 bp, Mus musculus
agaggcgtttcgaatctggagaaggtgctgatagatacccatcatacgattttaagcactgccta

SEQ ID NO: 29268 - DNA, 65 bp, Mus musculus
cctcaatggctgtcagagaaaggacagaggctgacttgcccaaaccaacttctcccaaggtcagc

SEQ ID NO: 29269 - DNA, 65 bp, Mus musculus
ctgcctatcacttctgagtcttaccgaacaaactttccaagttgggacttccagcaccagccacc

SEQ ID NO: 29270 - DNA, 65 bp, Mus musculus
agctttgaggactgggctgtcatcaaggagaaggcagaacctccgagacctctggctcacctctg

SEQ ID NO: 29271 - DNA, 65 bp, Mus musculus
ttaagagcttcaaacgtgtccggataaacttcagcaaccccttatctgcagccgatgccaggctg

SEQ ID NO: 29272 - DNA, 65 bp, Mus musculus
atgagaaagtatcgaatgggacttattcagacaccggaccaactcagattctcctacatggccat

SEQ ID NO: 29273 - DNA, 65 bp, Mus musculus
cgaagtcaaccagaacgagagatacgacaagttcaaccagatcctaacagccctctcacggaaac

SEQ ID NO: 29274 - DNA, 65 bp, Mus musculus
ctgaaacttgctgagaggcctgagagaagcgagtttgtgctacaaaactgtgaccactgtgggaa

SEQ ID NO: 29275 - DNA, 65 bp, Mus musculus
aaagaccggatgaggaagaccgttttctccagtcctttgccaacacgcaccgcaaccttgctttt

SEQ ID NO: 29276 - DNA, 65 bp, Mus musculus
tggggaggaggtcggtagggaaagacgactaaaagacaggtctcctcacaccggtccagtggcca

SEQ ID NO: 29277 - DNA, 65 bp, Mus musculus
aaaagggctatcttggtcctcaatgtgaacaagtggacaggaacgtccgcagagtgaccagggca

SEQ ID NO: 29278 - DNA, 65 bp, Mus musculus
aaacgactaaggatgaaaagcaaggcttgggtaaccattccccaggagcaaccagggagaaccac

SEQ ID NO: 29279 - DNA, 65 bp, Mus musculus
cactaccagccacattcaggaactctgttcacaggtatcctaccagcataatgaggctaactgtg

SEQ ID NO: 29280 - DNA, 65 bp, Mus musculus
acccagattaccgtaagcgagtgtctgtggagctcaccaattccctcttcaagcatgacccagct

SEQ ID NO: 29281 - DNA, 65 bp, Mus musculus
tctcagaagtgcacaggactgctagtgactgactggtgagatgaaagcctacaagacatggcctg

SEQ ID NO: 29282 - DNA, 65 bp, Mus musculus
catcacaacctcatattctcagcacctggacaatgagatcagtcatagcagctacttgggcaccg

SEQ ID NO: 29283 - DNA, 65 bp, Mus musculus
cctcgccatagtcaggtaatagcatccaatgggaggtccctaccaacctgctgtatccaaagttt

SEQ ID NO: 29284 - DNA, 65 bp, Mus musculus; identical to SEQ ID NO: 23716

SEQ ID NO: 29285 - DNA, 65 bp, Mus musculus
tgtccccacctgtatcgctccgcgaacacgcatgcgcagatcaaagcacgcctgcatggcctgca

SEQ ID NO: 29286 - DNA, 65 bp, Mus musculus
tgatgacgaaaacatacgaacctctgatgtgtgatatgcagtgcccgttgcgtgcaggagagcca

SEQ ID NO: 29287 - DNA, 65 bp, Mus musculus
gattgtgcgacgctacctctctctactcgatacggctgtggagcttgaactcccaggataccaag

SEQ ID NO: 29288 - DNA, 65 bp, Mus musculus
atgagtaaagcaaacttactccacactgacaataacatgaaaatcatcttgttctctgaagtgag

SEQ ID NO: 29289 - DNA, 65 bp, Mus musculus
atgcctggctctttggggctttcgtgtgcaagacggtacatctgctcatctacctcaccatgtat

SEQ ID NO: 29290 - DNA, 65 bp, Mus musculus
tccactctgcaaatgccaagactatcaaaggaacgtattgtcgcttctggctccttcccaggtgg

SEQ ID NO: 29291 - DNA, 65 bp, Mus musculus
catgggagacagagaaggagcccagagtgttctaatgctgatgtagcagactgatactacgtgga

SEQ ID NO: 29292 - DNA, 65 bp, Mus musculus
ccttcgtgacagccagagtaatccaaaggcgttcgtactgacactgtgccatcaccagaagatta

SEQ ID NO: 29293 - DNA, 65 bp, Mus musculus
aattccatacaggaggatgctgaaggctcaaagcttgaccctgggccacttcaaggagcagctca

SEQ ID NO: 29294 - DNA, 65 bp, Mus musculus
aacagtggactcaaacggcgctgactaccaaccctgtccccagttttctcccattccgtcgtcac

SEQ ID NO: 29295 - DNA, 65 bp, Mus musculus
aataaacaaggcaagactggaagccaccctgacccctgcaccaacaggaactgtgtcacctgccc

SEQ ID NO: 29296 - DNA, 65 bp, Mus musculus
atggatggtgttggcagtgctgtggtgctccatggcacagacactgctcctgccctccttcatct

SEQ ID NO: 29297 - DNA, 65 bp, Mus musculus
agaacactggagagttcttccgagaccaagggaggcagatctatctccctcaaccagccctttgc

SEQ ID NO: 29298 - DNA, 65 bp, Mus musculus
agacacctgctgccttgtcaacatggctgagcacttgtagagcactggatacccagaatacctta

SEQ ID NO: 29299 - DNA, 65 bp, Mus musculus
tgtgtctggtgcaaggtatcttctatcactgtactaatgaggatgatgagggctcttgcgccgac

SEQ ID NO: 29300 - DNA, 65 bp, Mus musculus
ctggggcctacagatcagtaggtgaatggctggaagcaatcaaaatgggtcggtacacagagatt

SEQ ID NO: 29301 - DNA, 65 bp, Mus musculus
tgctgaccgaggactgaccactcgaccaggttctgggctgacaaacatcaagacggaagagatct

SEQ ID NO: 29302 - DNA, 65 bp, Mus musculus
ccagaggggatttcctccggcatcttaatacacactttaatggggagacttaaatcacgtttgaa

SEQ ID NO: 29303 - DNA, 65 bp, Mus musculus
gtggtgcccttaccccaagaagccccagagtcaactactagtacgtacagtttccggctttgggg

SEQ ID NO: 29304 - DNA, 65 bp, Mus musculus
taggttacatgaccgtgaacatgctggctgaggactacacaaaccaggtttcccaccatacacgg

SEQ ID NO: 29305 - DNA, 65 bp, Mus musculus
cttctgacatccctgaccagccaagggtcttcaccctcaccacctttcactcacatgaaaccata

SEQ ID NO: 29306 - DNA, 65 bp, Mus musculus
cttactgtccggaatccagtggtccttagtgggcgggtttactctggcagagtttctgtttgaaa

SEQ ID NO: 29307 - DNA, 65 bp, Mus musculus
gagacaacagccaccaagcccgatggggatgcccaccctagagtgcagcaccccaagacccgctg

SEQ ID NO: 29308 - DNA, 65 bp, Mus musculus; identical to SEQ ID NO: 3481

SEQ ID NO: 29309 - DNA, 65 bp, Mus musculus
gaagtaagggcattggtttcctttgtcatagttgccgtggtgattagggattaggctttactgtg

SEQ ID NO: 29310 - DNA, 65 bp, Mus musculus
ttccaggtcctgcctggggacagagagctcctgattccagacggtgccaacgtcttctacgctat

SEQ ID NO: 29311 - DNA, 65 bp, Mus musculus
acaccttcccaaatgctcactatacgagattctactaagattcctaaaataactgctgctaccta

SEQ ID NO: 29312 - DNA, 65 bp, Mus musculus
aggaggatgaggaggaacgtgcagagctgaatcagtcagaggaagcggagatgccagagaatggt

SEQ ID NO: 29313 - DNA, 65 bp, Mus musculus
tggctgtggacaacatcctgtatatcgccaaccttggagatagtcgggcaatcctgtgtcgatat

SEQ ID NO: 29314 - DNA, 65 bp, Mus musculus
accactgaggaccagtcatcatgacacagcaagccgtgacccctctgtctgctgtactggcccag

SEQ ID NO: 29315 - DNA, 65 bp, Mus musculus
attcaaactcttatctcccaactctcctcgggctgagtgacccagtgcccgtctacctcaaagat

SEQ ID NO: 29316 - DNA, 65 bp, Mus musculus
cacacttcacaggggccttactggctgctaccgtagagaatggaagatgctgagtagcttatgat

SEQ ID NO: 29317 - DNA, 65 bp, Mus musculus
tgcagcctatgaccagctcatcatagatgggctgctgtcgaagatcctgagtgagtgtgagggcg

SEQ ID NO: 29318 - DNA, 65 bp, Mus musculus
cggaggacaaagaactagtgatcccggactctgcaaacgtcttttacgccatgaatagccaagtg

SEQ ID NO: 29319 - DNA, 65 bp, Mus musculus
tctggaaaccacctcagcttcaacagaggctggtccagtcaaccacctccaattgtgtagcatct

SEQ ID NO: 29320 - DNA, 65 bp, Mus musculus
ctggctctcagttctggtcaccaaacattgtgaatcaacgtgtctgctgcctgtgtcaacctgga

SEQ ID NO: 29321 - DNA, 65 bp, Mus musculus
cagccttggtggcttctgggttgctagactcatgtctgttagccagcacttctgctctgtcatct

SEQ ID NO: 29322 - DNA, 65 bp, Mus musculus
tgtaattcccctgaaggtactcgtagctaagggggcagaatactgtttctggtgaccacatgtag

SEQ ID NO: 29323 - DNA, 65 bp, Mus musculus
catatgaacctgtaaaatgctgtgtagctggagttcacgctcacagcctttagcgctttgttgct

SEQ ID NO: 29324 - DNA, 65 bp, Mus musculus
aggcagcagattgcctgaaacatccaggtcccttcttggacttctatgtgcttgtcccaaagatt

SEQ ID NO: 29325 - DNA, 65 bp, Mus musculus
gcctacctctggtctgaagtacaagaagtagtatctccaccgagttcatcagagtcttcgtcttc

SEQ ID NO: 29326 - DNA, 65 bp, Mus musculus
caggagcagggagaatacttccaacagttgaggtgttaccaaaccacttgagaattcatgagcac

SEQ ID NO: 29327 - DNA, 65 bp, Mus musculus
gctgtgaaccaacatgtatactgaagaaggatgcagagtgtagtcatggactctgctgcaacaac

SEQ ID NO: 29328 - DNA, 65 bp, Mus musculus
actgcagcaacttggtgtctgaagatgactcggaaacccagtctgtgtccagctttagttcggga

SEQ ID NO: 29329 - DNA, 65 bp, Mus musculus
tggaccaggtatatggtgggcacagaagctgaaatacaaagattcgcacacccatagacatacct

SEQ ID NO: 29330 - DNA, 65 bp, Mus musculus
atgatagactctcctcctgagctgtcacccttgattacaccacagtgtgccagcaagaaagctgg

SEQ ID NO: 29331 - DNA, 65 bp, Mus musculus
gcagggaggaggtgacacccttggggatactttagtcaacacacttagaacagattgtgccaggc

SEQ ID NO: 29332 - DNA, 65 bp, Mus musculus
gtgtgcctgatgttggtgaagtgaaagatggcaccacctgtggagtaggaaagatttgcctacac

SEQ ID NO: 29333 - DNA, 65 bp, Mus musculus
gctttctttgctgacctgcctgatcctttgattccatattcactccacccagagctattggaagc

SEQ ID NO: 29334 - DNA, 65 bp, Mus musculus
ttttcagggcctagcagggctgatcgagctatgcccaagctggctgactggaagctgtgtgcgga

SEQ ID NO: 29335 - DNA, 65 bp, Mus musculus
tgtgctgtgtgatgagtgtaaagtcacagagtgggtcaatgtgtgtaaatgaaggtgagcctcgc

SEQ ID NO: 29336 - DNA, 65 bp, Mus musculus
aaagacaatggatgctggctgcaagccttacatggcccctgagaggatcaaccctgaactgaatc

SEQ ID NO: 29337 - DNA, 65 bp, Mus musculus
gggatgtataaccgctttgaaaaggggttgcagcctcgacagtctgttacagattacctcatggc

SEQ ID NO: 29338 - DNA, 65 bp, Mus musculus
ggcaagcaaagaagtgcctggccacatcctgctggacatagacaatgacacagaaagtactgcat

SEQ ID NO: 29339 - DNA, 65 bp, Mus musculus
tcggatctaccacaccattgcttacttgactccccttcctcagccaaacaggggcttggcatttt

SEQ ID NO: 29340 - DNA, 65 bp, Mus musculus
gttttatcagcagaattccctcaaagattgcttcaagtcgttggacaccaccttgcagtttcctt

SEQ ID NO: 29341 - DNA, 65 bp, Mus musculus
gtgttcggcttcatcattggaagaaggcactgtggttatagcaaggctgaccaagaaggggatga

SEQ ID NO: 29342 - DNA, 65 bp, Mus musculus
aaggctgcccagcgaggactcactgtccagtgcttctacttctcattcagagaactcggtgcata

SEQ ID NO: 29343 - DNA, 65 bp, Mus musculus
acggtctctatgatgaggatgtgtgtaccccggacaaccttcaaaaggtgttggagagcgaggaa

SEQ ID NO: 29344 - DNA, 65 bp, Mus musculus
aaaacctcgatgcaccttcctgccccacaaacttccaaacagctgggcttacgggcatgctatat

SEQ ID NO: 29345 - DNA, 65 bp, Mus musculus
gagccaagctgcaagatcaacgaccagaagtggtatgtcatctcctcgtccatcggttccttctt

SEQ ID NO: 29346 - DNA, 65 bp, Mus musculus
agccaggggtacaggcctcactggggagctcagggccttcatgctaaactcccaataagggagat

SEQ ID NO: 29347 - DNA, 65 bp, Mus musculus
aagtagcagacgagtcgatgcttcacctggcatctagccactgcctcccacttctagcagaactg

SEQ ID NO: 29348 - DNA, 65 bp, Mus musculus
gggacttccagctgctgcccgttctctaagggtgtgtcttgtggtgatggctaccactgctgccc

SEQ ID NO: 29349 - DNA, 65 bp, Mus musculus
acagagccctgttacttgttggttttctggtatggaaagtacaagagggaaggcttgtggaaggg

SEQ ID NO: 29350 - DNA, 65 bp, Mus musculus
taagatacccagaggtcaggctcaattgtgggaacttcttccatgatctcaagctggccagatgg

SEQ ID NO: 29351 - DNA, 65 bp, Mus musculus
gaagcctggagtatacagtggaagagtgcacctgtgaggactgtgtcaagagcaaacccaagggg

SEQ ID NO: 29352 - DNA, 65 bp, Mus musculus
ttcatgtcaggtgtgagaggagggactcaaaggtggaggtcatagagctacaggacgtggaatgt

SEQ ID NO: 29353 - DNA, 65 bp, Mus musculus
ccggccttcaatcgaagaagttagttggcacccatggctagcaagcacttgataaaagcaatggc

SEQ ID NO: 29354 - DNA, 65 bp, Mus musculus
tgatcaccccagacttggagagcggtgtcaaggtttggcatctggtgaagaatcatgaccatggt

SEQ ID NO: 29355 - DNA, 65 bp, Mus musculus
ctgaccagattccctctgtctcaggatgaccagaaaccaagcaaccacaagaattgaaggaattc

SEQ ID NO: 29356 - DNA, 65 bp, Mus musculus
ggcctgtggatggagttttcttggtacgggatagtcagagtaaccccagaacttttgtactgtca

SEQ ID NO: 29357 - DNA, 65 bp, Mus musculus
tctgagccagacagattttaggcttctcttgtgttgcctgaggtcccacccttgcctgggctttc

SEQ ID NO: 29358 - DNA, 65 bp, Mus musculus
acctggggctcacctgttgattggtcctcaggtacagggagaggtgccttttgtatccccaaata

SEQ ID NO: 29359 - DNA, 65 bp, Mus musculus
tcgcgtctacctgctcttccggcctagtcagatggatgtagatacagatcccgcatgtgtctgta

SEQ ID NO: 29360 - DNA, 65 bp, Mus musculus
tggcccagtgaacgtgtccaacaaatgtggtccgtgcttctgctaatactgctgttcttcatccc

SEQ ID NO: 29361 - DNA, 65 bp, Mus musculus
gaaatgccgagaatcaagcacttcaaagtgacgcgcactggaaacaactacaccatcgagctgga

SEQ ID NO: 29362 - DNA, 65 bp, Mus musculus
ccaggtgcctttctttgcctctgcagtctcatttctcatgattttgcaagttagaccttgttatt

SEQ ID NO: 29363 - DNA, 65 bp, Mus musculus
gagatctatgggtggtaaacacaagtggcaacattattgcgagtgggaacacatggcccaggaag

SEQ ID NO: 29364 - DNA, 65 bp, Mus musculus
ccaagcagggccagagtttacacagatgttaacacacacagaccccgagagtactgggattatga

SEQ ID NO: 29365 - DNA, 65 bp, Mus musculus
cttcgaggactttgtggctggcttgtcggtgattcttcggggaacggtagatgacagactgaatt

SEQ ID NO: 29366 - DNA, 65 bp, Mus musculus
tctttgactatgcctatgaggtcattaagcaccggctgtgtagacgtgggaagtgccagaaggag

SEQ ID NO: 29367 - DNA, 65 bp, Mus musculus
ccattcttggtcctaaggttcatagttgaggccttctgttccagccttatgctcccatctcagag

SEQ ID NO: 29368 - DNA, 65 bp, Mus musculus
gattgtcagtggcctcaaatgtctgcatcacacctatcgtcggggactgcgtgtggacaaggcca

SEQ ID NO: 29369 - DNA, 65 bp, Mus musculus
aatgtaatggccttctaagcactgcaaggtggcagtcactcacagatatggcctgttaggccctc

SEQ ID NO: 29370 - DNA, 65 bp, Mus musculus
cctaccccaccatctgaaacggttcaagttacaccgggttcacagcctttgttaacctttcgcgt

SEQ ID NO: 29371 - DNA, 65 bp, Mus musculus
gacatcatggagaagctattcgagagggaccctgacaagaggctgggagtaacaggaaacatcag

SEQ ID NO: 29372 - DNA, 65 bp, Mus musculus
agcctcacgacaagagtacaccaagccacaccaggccaaggaaacacacaaagtcaaccacacac

SEQ ID NO: 29373 - DNA, 65 bp, Mus musculus
aaggtcatggacacttggctcccttctgttcaccttgtgtctggagcctacccaggagatatatg

SEQ ID NO: 29374 - DNA, 65 bp, Mus musculus
tcacatgatgacacaattctcatctgggacttcctgaatgatccagctgctcacgctgaaccgcc

SEQ ID NO: 29375 - DNA, 65 bp, Mus musculus
tcaagacaaagaagggcatggaagtctgcgctgaagcccatcagaagtgggtcgaggaggctata

SEQ ID NO: 29376 - DNA, 65 bp, Mus musculus
ctgacctactctctgatagctgcacagaaactctttggcgccacacttgctttagtgtgctgatt

SEQ ID NO: 29377 - DNA, 65 bp, Mus musculus
caagatggggcttcacaagggaatctctgtatgttgtaggctcaaggctccagcttctttagcac

SEQ ID NO: 29378 - DNA, 65 bp, Mus musculus
agttcaaccttcaccttggaagaggggaccatctacctgacggctgagccaaacaccctggacct

SEQ ID NO: 29379 - DNA, 65 bp, Mus musculus
tccctgcgtcctcgttcgcagagatccgctctttgtccgtggaatgtggctgctggttctccttt

SEQ ID NO: 29380 - DNA, 65 bp, Mus musculus; identical to SEQ ID NO: 23716

SEQ ID NO: 29381 - DNA, 65 bp, Mus musculus
cagaagcagaaagtaaggctggaccccgttcctggtgacagtgctgttaagtcttcagtctgttt

SEQ ID NO: 29382 - DNA, 65 bp, Mus musculus
gacagatagcagcagtcccattgctgtagccagaatgcacttatttcctgttctgaccctgcagg

SEQ ID NO: 29383 - DNA, 65 bp, Mus musculus
gtcttgatagtgctcgtcagcagtgactgttccacagctttaactggtcatgtaactggagactg

SEQ ID NO: 29384 - DNA, 65 bp, Mus musculus
aatcagagcatacaggaagctgctatcctcactgacagagagaagctagagccagtctgcagcct

SEQ ID NO: 29385 - DNA, 65 bp, Mus musculus
atcctggtggctctgtttatctcctccccactcatctgcttacatgcagccatagggtcaatcgt

SEQ ID NO: 29386 - DNA, 65 bp, Mus musculus
tagaatgtcaagtcagtgacacatgaggaggtatcagtctctggccatgccaccccatgcaggaa

SEQ ID NO: 29387 - DNA, 65 bp, Mus musculus
gctaattgccaagagcaacggcaaaggcaaggactgcgtattcacagagatcgtgctggagaaca

SEQ ID NO: 29388 - DNA, 65 bp, Mus musculus
cttgggtctagcctactggcaccggcagccatgacgagcactctggacctggacaagggctgcac

SEQ ID NO: 29389 - DNA, 65 bp, Mus musculus
atatgaactcggtaacagcacacaccgtccaacctccatacttaagcactggacaggacactgtc

SEQ ID NO: 29390 - DNA, 65 bp, Mus musculus
ctcagagaacttgttacatctcactgctaatagacccaagatgcctggaagacgattgcctggcc

SEQ ID NO: 29391 - DNA, 65 bp, Mus musculus
atttcatgaccttaggcaggacttctcttctgagctggtagaggcagtgtgagctgggatcactg

SEQ ID NO: 29392 - DNA, 65 bp, Mus musculus
gtggaacgggaagtccaccttatacactgctgtctgaagtgaatcgttgaactataaaagacatc

SEQ ID NO: 29393 - DNA, 65 bp, Mus musculus
caatgtcatcttcgactggtatcatgagatgctgatgagctgccaccacgacctggtatttgtag

SEQ ID NO: 29394 - DNA, 65 bp, Mus musculus
tcctgtcaacaaggtcttgaaaggtgaaatcccatggtcacaagaactccgaccagaagccaaga

SEQ ID NO: 29395 - DNA, 65 bp, Mus musculus
tcctatgatgaagcaggcacaacgtgtttgatccctctactctcagataaagacctcaccgtggc

SEQ ID NO: 29396 - DNA, 65 bp, Mus musculus
cactgaagggccacacatggttgaaagatgacgaggcaacacattgtaagcagtgtgagaaggac

SEQ ID NO: 29397 - DNA, 65 bp, Mus musculus
caggatagagactgatgctcatactccaagaacgatctttccaaacctacaggaattggtctcca

SEQ ID NO: 29398 - DNA, 65 bp, Mus musculus
ataggtgaagcctcctggagatgaagtgattcagcttccaagagataggctcagctcctgctgtc

SEQ ID NO: 29399 - DNA, 65 bp, Mus musculus
tactctgtgcagtcggacatctggagcatggggctctctctggtggagatggcagttgggagata

SEQ ID NO: 29400 - DNA, 65 bp, Mus musculus
gcttaaacgcttgcaaatgctgagactccatcagtgttctctgtgaaacctcagagggagcatgg

SEQ ID NO: 29401 - DNA, 65 bp, Mus musculus
gtgtatcataccctcaagtgacatatatcctcatggactgattgccactggaggaaatgaccaca

SEQ ID NO: 29402 - DNA, 65 bp, Mus musculus
atgtaaacagttgagtggcagtgcagaaggaagactgtgtgactgaagagtggcaaccaagaatt

SEQ ID NO: 29403 - DNA, 65 bp, Mus musculus
tcagcacacagagacacctggcacctgctgctcatgaagaagtgcacaaggcacaaatgtgtaca

SEQ ID NO: 29404 - DNA, 65 bp, Mus musculus
gtttcgtcatggagggtggccttctggacaagccggacaactgccctgatatgctgtttgaactt

SEQ ID NO: 29405 - DNA, 65 bp, Mus musculus
tccgggttctgggaaggtcccttggctgggagactttgggaccacaacaaaggagaatagtggta

SEQ ID NO: 29406 - DNA, 65 bp, Mus musculus
gcaggcacaccatgatcaaccactagagaagtctacaaagctatgactcgaaaccagagataagg

SEQ ID NO: 29407 - DNA, 65 bp, Mus musculus
gcttcgagaggccatgaggaagctcctgggtcatcaggtgggacaccgggacatagaggaaatta

SEQ ID NO: 29408 - DNA, 65 bp, Mus musculus
tgagacctgtcttcaaatggaggcagtttgcagcccctaagcaaggatgctgagagaagcagcaa

SEQ ID NO: 29409 - DNA, 65 bp, Mus musculus
aatgccacaactcaaactgcttcagtgggaagtacagagacccagtgcattgcgtgtgcaggagc

SEQ ID NO: 29410 - DNA, 65 bp, Mus musculus
gctgtcttatggtcctcactgcagactgtacctggattggcatttggctatacaacagaggcatg

SEQ ID NO: 29411 - DNA, 65 bp, Mus musculus
tcatgagcccagtcgtgatgtggaaacaagtcgtgtgccccaaatatctgtcagaatgccaccca

SEQ ID NO: 29412 - DNA, 65 bp, Mus musculus
tccacacgatgaccccaaactgctcacgtcgacctcagaagtatgaccagagagccacctgaaaa

SEQ ID NO: 29413 - DNA, 65 bp, Mus musculus
taggagaatctcaggtgaccttaaaggaggccatctcgttctcgttctcatccttggtgccctct

SEQ ID NO: 29414 - DNA, 65 bp, Mus musculus
gttacagctttactcacagacaagcctcccaagccattgttccccatggaaaatcagccaagtgt

SEQ ID NO: 29415 - DNA, 65 bp, Mus musculus
gatgatggaatttggagcgaatggagtgaagaggaatgttgggaaggttacacagggccagactc

SEQ ID NO: 29416 - DNA, 65 bp, Mus musculus
attcagaggatctgctcttggtcacagaccctgcttttctgtcttgcggctgtgtctcaggtagt

SEQ ID NO: 29417 - DNA, 65 bp, Mus musculus
ggtcctgtgcgctcaggaagttggtgcggacaatgttcatcttgcttgtgttagtaactggagtt

SEQ ID NO: 29418 - DNA, 65 bp, Mus musculus
cagctgatttcatctgtaacccggtcagacttgggtggttaaaaggacaggcagaaagaggcggg

SEQ ID NO: 29419 - DNA, 65 bp, Mus musculus
ccacatggccttttgtgggacatacatgtctcccttgaatgtgctaattttgtgcaggaggcaca

SEQ ID NO: 29420 - DNA, 65 bp, Mus musculus
agatgtgattcttgaggcccagagaaggtgactgtcttgcctgatgtcacacagcgtttgcagga

SEQ ID NO: 29421 - DNA, 65 bp, Mus musculus
acacacccctttccctgataacccgacatgagcatctggtcatcattgcacaagaatccacagcc

SEQ ID NO: 29422 - DNA, 65 bp, Mus musculus
atcaacaagacagaaagacgcaaacacctcatgtgctcactcctgcttgggagctgaccgagctt

SEQ ID NO: 29423 - DNA, 65 bp, Mus musculus
cctagccatgaaggctatttaccctccaacatagaagatctgtcaccacatgaggctgacccaac

SEQ ID NO: 29424 - DNA, 65 bp, Mus musculus
cccaaaacataaacatgccccatcctttgggttgcttcttgtatgccacagctgaattatattta

SEQ ID NO: 29425 - DNA, 65 bp, Mus musculus
gttatcaggccagagcactgcattgtttacagtccaagcaaaagcgtttctgctgaatcctgtga

SEQ ID NO: 29426 - DNA, 65 bp, Mus musculus
atggtcgtgtgggaaccagctcttgaagactgcgaggtgacgcctgtgacagacgcctgagaact

SEQ ID NO: 29427 - DNA, 65 bp, Mus musculus
ataccacgaagtcatcatgtgacgtgacagataagtggttggagggcatggagagctacgtcgtc

SEQ ID NO: 29428 - DNA, 65 bp, Mus musculus
agtcacagaggatgaaataccacatcaaggcagtgggaacttcctgcgacttctcctggtcctcc

SEQ ID NO: 29429 - DNA, 65 bp, Mus musculus
ctttgacaacccaaacgaagaggtcctgataagactgaatgcagcctgttgactatggagggtcc

SEQ ID NO: 29430 - DNA, 65 bp, Mus musculus
cagcaatctgagtgaatcccagctagagctgagatggaaaagcagacatattaaagaacgctgtt

SEQ ID NO: 29431 - DNA, 65 bp, Mus musculus
cctcctacacttttccacttcctcccactgccttgggtctaaagggaactggggccatttctctt

SEQ ID NO: 29432 - DNA, 65 bp, Mus musculus
taagacaaggtggctacatgccgcagtgaaggactggctcctgaacttcagcaggaactgcaaaa

SEQ ID NO: 29433 - DNA, 65 bp, Mus musculus
aagagagttgggagagtttgagacttcgctttgttcttctatcagccaagcttcgacacatgaag

SEQ ID NO: 29434 - DNA, 65 bp, Mus musculus
cccctattctcacccagtttgaccttgattccacaatgccttcctctgtaacaggatcttttgtc

SEQ ID NO: 29435 - DNA, 65 bp, Mus musculus
cttcccaaagagatgttgatgaaagagccttcatggcaacctgttggtcaactcatgcttagtca

SEQ ID NO: 29436 - DNA, 65 bp, Mus musculus
cagctgttccctctgttctctgtagtttctgcacggttggagtctgtattcatcccagccactat

SEQ ID NO: 29437 - DNA, 65 bp, Mus musculus
tggaggctacaagcccttccagaatcctgttcctaaccagtcccctagctccgtgcccttattta

SEQ ID NO: 29438 - DNA, 65 bp, Mus musculus
tgttctgaggacttccctggaccacagttttggccagatcccttcaggtcccagcccagcatgga

SEQ ID NO: 29439 - DNA, 65 bp, Mus musculus
tgacaggcagtggaatgaagcggcatctgtggttttagggtctgggttcctggaacagacacaga

SEQ ID NO: 29440 - DNA, 65 bp, Mus musculus
cccgtaagaatgccagcaacatggagtacaggatcaataagccaagagctgaggattcaggcgaa

SEQ ID NO: 29441 - DNA, 65 bp, Mus musculus
gggcacagagaacagtttgtgggactgcagtaagaactcctggggcaatcacaattgcgtacata

SEQ ID NO: 29442 - DNA, 65 bp, Mus musculus
ctgcattcctcaaggtgaagctacttttggaagaacacagcagtgttagcaggtcacgtgtgcac

SEQ ID NO: 29443 - DNA, 65 bp, Mus musculus
agaataacaccagacgaagagaagcacgcacggagaaagcagactaggcagcagaggagcagcca

SEQ ID NO: 29444 - DNA, 65 bp, Mus musculus
aggtaaatctgacaatgcgcagagaagccgggtccataaaacggatatactctgaacactggggc

SEQ ID NO: 29445 - DNA, 65 bp, Mus musculus
tgtctccattacatctgtataggctcgtccctttcccaggacttgagtcaagcacgggatagtgg

SEQ ID NO: 29446 - DNA, 65 bp, Mus musculus
ctgaaggagctgcagacctggctatggcgttcagccaaggacttcaaccggcttaagaagaagat

SEQ ID NO: 29447 - DNA, 65 bp, Mus musculus
ctgcgtccctgaccccagcggctccttccctggactctttgagaagcatcacgggaacttccagg

SEQ ID NO: 29448 - DNA, 65 bp, Mus musculus
ctcagtgcttatcccctgagcagcagctgtgtcatcctttcctggacactgtcacctgatgatta

SEQ ID NO: 29449 - DNA, 65 bp, Mus musculus
ctgccccgttttcacttgccagcacatttcagtcatgtggtgtgatagccaaagatgttttggac

SEQ ID NO: 29450 - DNA, 65 bp, Mus musculus
cctgcctcctggactggagaaaggttccttcaaacagcacggagactgtcatagagtctgatcag

SEQ ID NO: 29451 - DNA, 65 bp, Mus musculus
acagacccagcaaatggcaagtttggtgtccaacaaggaacttgtcagaacaaagactccctggg

SEQ ID NO: 29452 - DNA, 65 bp, Mus musculus
gcacttaaagcccgctccaagtcctgccacaacctggctgtgctctgaggccagcgcctctctct

SEQ ID NO: 29453 - DNA, 65 bp, Mus musculus
ggatggggacttcacagagcagtcacagtgtgccaagaccaagttctggaagaaagtgagatatc

SEQ ID NO: 29454 - DNA, 65 bp, Mus musculus
acaatgctagtgtgaggactatttccaagcctgtgacaccgtgcaagagacggtcgaactactgc

SEQ ID NO: 29455 - DNA, 65 bp, Mus musculus
ccacattcctggtagctggaggaagcttggcgtttgggttgcttctctgtgtcttcatcatcctg

SEQ ID NO: 29456 - DNA, 65 bp, Mus musculus
cactgtacctctaagaccttggaagtgcattaccttgctgattcagaagaccaagcgaaggatgt

SEQ ID NO: 29457 - DNA, 65 bp, Mus musculus
ggatcagccagtatcttgagtagtttaggtgggagaagactttgctcactattgcagatgctctg

SEQ ID NO: 29458 - DNA, 65 bp, Mus musculus
gtgagagaaatgctggcatgacaagagtggaccaactgctttaatgcagaaggatggacaggatg

SEQ ID NO: 29459 - DNA, 65 bp, Mus musculus
ttgccatcttgtttactcatgccattgtatgataggttctcttgacctatctgtttctgtttctc

SEQ ID NO: 29460 - DNA, 65 bp, Mus musculus
tgttttagctggccctaccgtttcctgcgcaagtacggctctgacaagggtgtgttctcgtttga

SEQ ID NO: 29461 - DNA, 65 bp, Mus musculus
catgtccatggagatggattaagcagttggagatggagggacagaggaacattgtaggagcggtg

SEQ ID NO: 29462 - DNA, 65 bp, Mus musculus
ttcacctgggcagtcacgaaaccaactacacgctacatgtggctgagattgctggcaatatccct

SEQ ID NO: 29463 - DNA, 65 bp, Mus musculus
attctgctaatagatgggaaagacaaggctgcacgcaggaaacagtgctacctcacccagccact

SEQ ID NO: 29464 - DNA, 65 bp, Mus musculus
ggggtctgcaagcattgttgtctgaaacagtcagagcaacaggaaacaaatggcccagatccaga

SEQ ID NO: 29465 - DNA, 65 bp, Mus musculus
ttggagccttctgaggtcaacagaatcgccacttgggtccagagaatgccactcacaatcatgtt

SEQ ID NO: 29466 - DNA, 65 bp, Mus musculus
ttttggggtgtccatagcagtcggacttgctgcctttgcctgcgtccttctggtggttctcttta

SEQ ID NO: 29467 - DNA, 65 bp, Mus musculus
tccccagagcagcagccagtgaccagggctgagctggcctctgtgaactcccaggaggtggaaga

SEQ ID NO: 29468 - DNA, 65 bp, Mus musculus
tctactattcagttcatcagcacttgcacaagatcaatggcatccgctggcactacttccgaggc

SEQ ID NO: 29469 - DNA, 65 bp, Mus musculus
tacctcagaaccagcgcttcatccccatcaatggatacccaatacctcctggctatgcagccttt

SEQ ID NO: 29470 - DNA, 65 bp, Mus musculus
ttggcgcagacggagaaccaacctaagttttctgccttggagatgctggagaattcgctgtacag

SEQ ID NO: 29471 - DNA, 65 bp, Mus musculus
gtgtcatcaccacctgcacatctatccaggagcaagggctgaaggccaacaactccaaagagtta

SEQ ID NO: 29472 - DNA, 65 bp, Mus musculus
gatcagaaggacagcgtgcagactctgtcacaaggaagaatgttccgtgggagttcagcagtaaa

SEQ ID NO: 29473 - DNA, 65 bp, Mus musculus
catccaaatccgctaccaggaggaaagtcaagtctacttgttgggcactggacttcgaggaaaag

SEQ ID NO: 29474 - DNA, 65 bp, Mus musculus
agaactatgtccctatgcaaaacccagtatctgcatcccctgttcccagtggcactaacagccca

SEQ ID NO: 29475 - DNA, 65 bp, Mus musculus
tgatatgccagcctaggtgacacaggggaagccgcagctgtatgtacacatcccttcaagttgtg

SEQ ID NO: 29476 - DNA, 65 bp, Mus musculus; identical to SEQ ID NO: 23716

SEQ ID NO: 29477 - DNA, 65 bp, Mus musculus
tatttgctgcatcaaatgtctccgaagaacaagacagtgaagctgagaaacatcctgaggtcttg

SEQ ID NO: 29478 - DNA, 65 bp, Mus musculus
gagcacccaccaggcaaggctccttggacatctatagcacagcagaagggaaaactcacatggtt

SEQ ID NO: 29479 - DNA, 65 bp, Mus musculus
ccttaaccactccatgactctggctatccatgagatttcccacaatttcccctttggccaccaca

SEQ ID NO: 29480 - DNA, 65 bp, Mus musculus
aagggccaccttcagagggccagttcagtccagtgtgagatcagcctggtagagacaaacaatac

SEQ ID NO: 29481 - DNA, 65 bp, Mus musculus
atgactccctcaatgtcacactagcatacccagtatatgcacaacagaggcgatgaagcgctgcc

SEQ ID NO: 29482 - DNA, 65 bp, Mus musculus
ccatggccaagagacctgaagagcaatgccaagacaatgcagaactagacttcatcagtgggatg

SEQ ID NO: 29483 - DNA, 65 bp, Mus musculus
gaagccaggactccatgatccagaatccctgaggtgaggcgtttagttgatgcgtgtttgggatt

SEQ ID NO: 29484 - DNA, 65 bp, Mus musculus
tttaaggcaatatctcttcatgttgcagatgcaatcaattctacagcaggaggttgagaacagtg

SEQ ID NO: 29485 - DNA, 65 bp, Mus musculus
cagtgcagccattccacctccgaggcatgagttctaccttctcccagcgcagccacagcatcttt

SEQ ID NO: 29486 - DNA, 65 bp, Mus musculus
agagctatgctaactgagaggtctggggtcagcactgaaggcccacatgaggaagactgatcctt

SEQ ID NO: 29487 - DNA, 65 bp, Mus musculus
gtcctctccgggctggcccagatgatgagagagtgctggtaccccaacccctctgctcgcctcac

SEQ ID NO: 29488 - DNA, 65 bp, Mus musculus
tgttcactccagagaatcctgaaagatgtggtagctgatgctcccaggtccagacacagcctcta

SEQ ID NO: 29489 - DNA, 65 bp, Mus musculus
gaatttcacagaagcatcgttagcccaagccttgaacgttagcctactgcccagtgagttcagac

SEQ ID NO: 29490 - DNA, 65 bp, Mus musculus
ggatgttaatgtggtcatgttcttagcaccacagtgtctgggcatctgggaaactccgagacttt

SEQ ID NO: 29491 - DNA, 65 bp, Mus musculus
ctaaatctagcactgctgtgtaccttgcagagggaggcactgccacgaccacagtgtctaaagat

SEQ ID NO: 29492 - DNA, 65 bp, Mus musculus
ggatctctctatgacttcctgaaatgtgccacactagacaccagagccctactcaagttagctta

SEQ ID NO: 29493 - DNA, 65 bp, Mus musculus
ggaaagttgtctgtgtggatcaacagaggccaaacatacctaacagatggttctcagacccgaca

SEQ ID NO: 29494 - DNA, 65 bp, Mus musculus
gtatttatggatctcagtcactaaacctctgccacaggcagccacaagaggccagctaatgaaaa

SEQ ID NO: 29495 - DNA, 65 bp, Mus musculus
tggcttgtcacctatgacacagtgtgtagacattaaggagagactgaggtccctcctgctcagca

SEQ ID NO: 29496 - DNA, 65 bp, Mus musculus
gtgttaaatccctctggcccacttacataggcaacttcccttacacattttggggaacagtctgt

SEQ ID NO: 29497 - DNA, 65 bp, Mus musculus
tactcgcgacagttcatcacctcctgcccctgttggctggagatcctactcaacaaccacagata

SEQ ID NO: 29498 - DNA, 65 bp, Mus musculus
cttccggccagtttgctacgaggaaccccagcactggtgttctgttgcctactacgaactaaaca

SEQ ID NO: 29499 - DNA, 65 bp, Mus musculus
agcggaaaaaggtggacccttgcggacgcttacaccacacaatggcagccagaacccactagcaa

SEQ ID NO: 29500 - DNA, 65 bp, Mus musculus
tgacagaggtctgggatgtcacagtccaaaaggaaagtgcctttctccatggctggagtatggag

SEQ ID NO: 29501 - DNA, 65 bp, Mus musculus
cttccgtggtgctaaggatcagcctcagtcttcaggcgtgctaggcatgtactttgccaagtatt

SEQ ID NO: 29502 - DNA, 65 bp, Mus musculus
cgatgctcaagcatgtcgtaaacccatcaaagactcgctgtaacagctcctccgtcgtagtattc

SEQ ID NO: 29503 - DNA, 65 bp, Mus musculus
tgaagcagccttcgtgagtctgttggtagagtttggagccaacctgaacctggtgaagtgggaat

SEQ ID NO: 29504 - DNA, 65 bp, Mus musculus
tacagacctggggtgctttgctcgctttcctcctgcttctgagcttttcctgcaacaggacccgt

SEQ ID NO: 29505 - DNA, 65 bp, Mus musculus
ggagaaatcagtgtgtccacaagactcacagttttacgtgaggatcagattcctagagggttccc

SEQ ID NO: 29506 - DNA, 65 bp, Mus musculus
ggagactgctgggttttggtaccatggcttacacaatgaaccccgtaactacacactcacactga

SEQ ID NO: 29507 - DNA, 65 bp, Mus musculus
taacgagaccacaggagggctatctgatggtacaacagttccagtacctaggctgggcttctcat

SEQ ID NO: 29508 - DNA, 65 bp, Mus musculus
tcaaccgtctgagcttccagcttggggacctcttgaaggactatgggtctcctctcttacctgaa

SEQ ID NO: 29509 - DNA, 65 bp, Mus musculus
gcaagcaattggatactatggtttcattgaacagcaaacactatgtccaaagccactttcttggc

SEQ ID NO: 29510 - DNA, 65 bp, Mus musculus
agccgtcaacttactcagattcagtacacagcctggcctgaccatggagtacctgatgattcgag

SEQ ID NO: 29511 - DNA, 65 bp, Mus musculus
atttccccgaacggaagctggcttattgagaaccagttcacggatgccataacagaaccctggga

SEQ ID NO: 29512 - DNA, 65 bp, Mus musculus
ggacactgtcatgcacgacctcacatttctaaaagacctccttcctcaagagacaaatgaaggca

SEQ ID NO: 29513 - DNA, 65 bp, Mus musculus
gtggcaaccacctgtcttagcagagagaaatggagttatcaccaagtataccctcctgtataggg

SEQ ID NO: 29514 - DNA, 65 bp, Mus musculus
atgtgtatctgcatcagtgtgtaagagacgtcctcagagcaaagaaactgcggaacgagcaagag

SEQ ID NO: 29515 - DNA, 65 bp, Mus musculus
aatcccttcctaccaccaagtcaaggagttctacagtgtccgtgacgatcagaactgtcagtatg

SEQ ID NO: 29516 - DNA, 65 bp, Mus musculus
taaagagcgacaccctgtctgaagcaatcagcgtacgagactttctggttaccttcaaacagccc

SEQ ID NO: 29517 - DNA, 65 bp, Mus musculus
cctgctgagtgacctgcatgccttttctggtagtgctgcctgggatgacagcgctggaggagcag

SEQ ID NO: 29518 - DNA, 65 bp, Mus musculus
cctaaaggaccaagagagccaccttcagaatggacatgatgcagggagtgaaaggacacttcaca

SEQ ID NO: 29519 - DNA, 65 bp, Mus musculus
cccgctcgatggcaacaagatctgtgcccagatagaaacacggcgacacgaagcgacatacagaa

SEQ ID NO: 29520 - DNA, 65 bp, Mus musculus
gatcagaagttgtctcttgttgtcatgctgacgactctcaccgagcgagggcggaccaaatgtca

SEQ ID NO: 29521 - DNA, 65 bp, Mus musculus
gtctgaactgatgtgtgagtgggactaatgagtccacgggtcactgtagtcaggagtgttgttac

SEQ ID NO: 29522 - DNA, 65 bp, Mus musculus
gcccaagccgtgcaaacttcttctactagctatcctgaaaccacagagaactccacatcttctaa

SEQ ID NO: 29523 - DNA, 65 bp, Mus musculus
agcatcagaaagacctagacaggctgggtttgggacttcagggtggcatccccaatggctacctg

SEQ ID NO: 29524 - DNA, 65 bp, Mus musculus
tggagcagtttctgcaggaatgttgtgtgcccttaccaccttgtcccagcagctagagaatgaaa

SEQ ID NO: 29525 - DNA, 65 bp, Mus musculus
tggctacacaggaagacgtggtgatgaatctccttcaaagaaactgagcgagtgtgctcctcgct

SEQ ID NO: 29526 - DNA, 65 bp, Mus musculus
gcctgtacatactgtaaatgcattgggatcaaactgtctccccaggaaactgcacatgggtcatg

SEQ ID NO: 29527 - DNA, 65 bp, Mus musculus
cccttcgctatccatggagtctcttctgagccatacagggcacttgagaagtccttcttaacttc

SEQ ID NO: 29528 - DNA, 65 bp, Mus musculus
aaaggccaccaaacaagaggccacccatcctaccaagggtttctttgggccattccccactgtgg

SEQ ID NO: 29529 - DNA, 65 bp, Mus musculus
caatgtgtaccattctggaatgacctcaaggtgtcctccttgtcctgttgatgatcttgtagttt

SEQ ID NO: 29530 - DNA, 65 bp, Mus musculus
gccgctaccatgcaaagcaaactgatccaaaagggaaatgacagaccaaacggcgaggtgaaaag

SEQ ID NO: 29531 - DNA, 65 bp, Mus musculus
tcacctttctgaagatttggaacgaccacttccgatgccagcccaagcctcccattgaggaagat

SEQ ID NO: 29532 - DNA, 65 bp, Mus musculus
ttttgctctgtgttggctcccagtgcatgccatcaactgtatcaccctcttccatccagccctgg

SEQ ID NO: 29533 - DNA, 65 bp, Mus musculus
tcctatcccgagaggtccaccagctacctcctcagctcgtcagcagtaagaatgacttctttgaa

SEQ ID NO: 29534 - DNA, 65 bp, Mus musculus
gaaggaaagccatcaagtcacttaggtgaacccagatgagaaaagcagcctgaaatgctcttcgc

SEQ ID NO: 29535 - DNA, 65 bp, Mus musculus
aacttaagctgtggagactgagaccacccctccaaggatctcgtctgagcatctctagtgacctt

SEQ ID NO: 29536 - DNA, 65 bp, Mus musculus
gcgaaaagcaaccaaatgtagacccatgtatggctatggagcaatggcttatgcccagatttccc

SEQ ID NO: 29537 - DNA, 65 bp, Mus musculus
aggggtccagctactggaagggctctaccccaaactctgaggactaccttacagctgacttaagt

SEQ ID NO: 29538 - DNA, 65 bp, Mus musculus
aacaccccgctgaacttggagcagagaagggcctccttggaggacttctatggaagcccgattcc

SEQ ID NO: 29539 - DNA, 65 bp, Mus musculus
ggactaaatacccctcccgatcacatccattatcaaggatttgaagccactccatgtactgggtt

SEQ ID NO: 29540 - DNA, 65 bp, Mus musculus
taccacaacgctgaacctgaagaaaaggactcgccacgtcacagtcagtccaatctccggaattc

SEQ ID NO: 29541 - DNA, 65 bp, Mus musculus
cttgaagctcttcagggttgcctccatagtgttggaaaggatctcctgtctgccccataatcaga

SEQ ID NO: 29542 - DNA, 65 bp, Mus musculus
tcaggagtttcctgagtctgtctccttgacacagcctctcctctatcccttatccatcagaggag

SEQ ID NO: 29543 - DNA, 65 bp, Mus musculus
cctacagaacactgaccattcactgtgcagaccacagagcaagaccttggtgttaagaaggaatc

SEQ ID NO: 29544 - DNA, 65 bp, Mus musculus
agaaggagctgttgaggatggaggtggagcagctgaagaaggaagtgaagaacccacgtgatctg

SEQ ID NO: 29545 - DNA, 65 bp, Mus musculus
acgtttgcactatgccaacaatcggagaatcgaggatctccatttattggtggaacgcagatggc

SEQ ID NO: 29546 - DNA, 65 bp, Mus musculus
gcaggcagatgcagtctggtgtttcaggattcagagacctcaacacagaagctcatgtgaaagcc

SEQ ID NO: 29547 - DNA, 65 bp, Mus musculus
agacggaggctcacatgggtgctatgaggctgatgatctgtttcctcgtgctctacattccatat

SEQ ID NO: 29548 - DNA, 65 bp, Mus musculus
cagtgcctgctactcatcactcagccaacaagacatcctgctcagaagcctgtataatgccatct

SEQ ID NO: 29549 - DNA, 65 bp, Mus musculus
gtgatcagagcgggtgcaaaggcacccctcacagcagtagtgctgagaagtcagccagttattct

SEQ ID NO: 29550 - DNA, 65 bp, Mus musculus
ctacatgtgttttagcagtcaccttattttatcgattattgctacccctaacttgacctcagata

SEQ ID NO: 29551 - DNA, 65 bp, Mus musculus
gagttactccagaacaagcacgttttccccaacaatcgccatcagggaagcttttcttatcagtc

SEQ ID NO: 29552 - DNA, 65 bp, Mus musculus
ctaggaagtcaactcatgcaagcgatgaagcaaccagagcagacaagttgctgtctcgtgattgc

SEQ ID NO: 29553 - DNA, 65 bp, Mus musculus
tgagtcagacatcaatgccatctgtttctttcccaacggggaggccatctgcactggctcagatg

SEQ ID NO: 29554 - DNA, 65 bp, Mus musculus
ccagcttaagaaggaagtgacactggagagaatgatggtttccaaatgttgtgaagaagtgagag

SEQ ID NO: 29555 - DNA, 65 bp, Mus musculus
attgaagctgggatcgaacgcatcaaggtctccaaggcctcgtcagacctgatgggctactgtga

SEQ ID NO: 29556 - DNA, 65 bp, Mus musculus
gccatctcagctgccttcaaagtaccccttatcactgtcaccaactcaaaagttctgctggtcct

SEQ ID NO: 29557 - DNA, 65 bp, Mus musculus
gctgctgctctggctctccttgactgcagtttgtggagtgccactgatgttgcctccagatggaa

SEQ ID NO: 29558 - DNA, 65 bp, Mus musculus
cctgcttccatgagagatgtgggagggatgaataagccagtatgactagtcgtggaaatgtcttc

SEQ ID NO: 29559 - DNA, 65 bp, Mus musculus
agttttcggacttctcggtcactcagcttcaggatgagagagccgctgtccagcatttccagcgt

SEQ ID NO: 29560 - DNA, 65 bp, Mus musculus
aaggttggccgctactaagactggaactgaacctggaccttgagataacctggcttggcctggct

SEQ ID NO: 29561 - DNA, 65 bp, Mus musculus
ccatgtccaatgaggacttcaaacaagcgttccacaaactgatacgctttaagtgcgcaggttga

SEQ ID NO: 29562 - DNA, 65 bp, Mus musculus
gcgggagtcatgaaggaaatgtccaactccaaagagctgaccctgagaatccactctaagaactt

SEQ ID NO: 29563 - DNA, 65 bp, Mus musculus
attcaagaggcccatcatcccaggcatggaatttagccgcagcaaatcagacaactcctctcacc

SEQ ID NO: 29564 - DNA, 65 bp, Mus musculus
aagtatcgaaaccagctccagcagctatgcagaggtagcacacctaagcgccgaacaactgcttc

SEQ ID NO: 29565 - DNA, 65 bp, Mus musculus
gaatttaagccaggacattccttgcatgatctgtccgtgacagtcaaaatgccccagtacagcac

SEQ ID NO: 29566 - DNA, 65 bp, Mus musculus
gacggccatccagctcatggggatcatgtgtgtgctgtccgtctgttggtcgccgctattgataa

SEQ ID NO: 29567 - DNA, 65 bp, Mus musculus
cagtaccaacttcctggcgaagaagccaagatggagactgagaagtgtttggggaagagccaaaa

SEQ ID NO: 29568 - DNA, 65 bp, Mus musculus
agtcggggttatgttctcacctcagattcacagccgaggaacagcaggaacttgaacctctgtct

SEQ ID NO: 29569 - DNA, 65 bp, Mus musculus; identical to SEQ ID NO: 3523

SEQ ID NO: 29570 - DNA, 65 bp, Mus musculus
ctttcaccctctattccttgatcgccgattacacctacccctcgatctatacctatgccaccctc

SEQ ID NO: 29571 - DNA, 65 bp, Mus musculus
catggagttttaccaagatgtgaaggactggtggctctttgggttctacttctgcatgcccttgg

SEQ ID NO: 29572 - DNA, 65 bp, Mus musculus; identical to SEQ ID NO: 23716

SEQ ID NO: 29573 - DNA, 65 bp, Mus musculus
ggcagctgttgaggagactttgggctctcactctcggggaggtgatggtcattcctggaactcct

SEQ ID NO: 29574 - DNA, 65 bp, Mus musculus
aaccttctctacttcttctacgaaatcatcgactgcttttccatgctgcactgtgtggccaaccc

SEQ ID NO: 29575 - DNA, 65 bp, Mus musculus
aaaggaagagccaagaaggcctgcggatgttttcctgtcctggtgtcagcactcaccaaagaaat

SEQ ID NO: 29576 - DNA, 65 bp, Mus musculus
atcaccaagttccaaccattaagatccacaccatctccctcggtgaaaacggggaggaagtctag

SEQ ID NO: 29577 - DNA, 65 bp, Mus musculus
aatctagctcataccagggtatcctcagcctccatgaccccatttctgacctcagtttccgaagg

SEQ ID NO: 29578 - DNA, 65 bp, Mus musculus
tgcttctggagaggacactcctgcttttgatcacacaggttgcaagaacagcttttccgtcagtg

SEQ ID NO: 29579 - DNA, 65 bp, Mus musculus
actccagagaccccagcaccacagcccatattaaggccctgcaaatgatggtcacctttctctta

SEQ ID NO: 29580 - DNA, 65 bp, Mus musculus
tgctgaccctcttcgctctgccaaggactactaacagcttcatgatcatcagcctattcgccaca

SEQ ID NO: 29581 - DNA, 65 bp, Mus musculus
agatcttcagtcttggttatcaggataccgctgaggggcttgctggatcccaagtgcaaagtaat

SEQ ID NO: 29582 - DNA, 65 bp, Mus musculus
ggaaataccagtcaactgtgaagaaggctgtatagaagggatggtaaagaaaccagataaaggtt

SEQ ID NO: 29583 - DNA, 65 bp, Mus musculus
tgccctgactgttgccagcagttttgcccactcaaggctcccagccccagagagcaaacatgcat

SEQ ID NO: 29584 - DNA, 65 bp, Mus musculus
tctacaaaccttagtgatgactgcagacacagaaccatggagctgagcctgcttctgcttgccag

SEQ ID NO: 29585 - DNA, 65 bp, Mus musculus
ccaaggctacgaggaagctgcgtctgagaccgagtgatttgcgcagtttcctaaccatgtttgca

SEQ ID NO: 29586 - DNA, 65 bp, Mus musculus
gcttggccttttgcctattctccctttggtcttaggatctgactattggctgagcctgtccatca

SEQ ID NO: 29587 - DNA, 65 bp, Mus musculus
cagtgctttcaaggtcttcttctccaagcaacaatgagagaccacatgggagtgccttcttccca

SEQ ID NO: 29588 - DNA, 65 bp, Mus musculus
ctgaaccgaacctacgccatctcctcgtcgctcatcagcttctatatcctggtagccatcatgat

SEQ ID NO: 29589 - DNA, 65 bp, Mus musculus
agaaggagaggcgccaagatcacgggaagggagcgcaaggcaatgagagtcctgccggtggtagt

SEQ ID NO: 29590 - DNA, 65 bp, Mus musculus
accctcatcaccaccatcctcttcttggtcacctgtagcttcatcgtcttggagaacctgatggt

SEQ ID NO: 29591 - DNA, 65 bp, Mus musculus
gcttggtcctcactaagagtcagccattacctttacacttgacactgggacttgcagtggtgact

SEQ ID NO: 29592 - DNA, 65 bp, Mus musculus
caagacctctgatctacagaaactggagcagccattcccagcaaagtaacgtggaatccactttg

SEQ ID NO: 29593 - DNA, 65 bp, Mus musculus
gacatcttctacatcatccgaaataagctcagtcaaaacctgtctggcttcagagagacgcgtgc

SEQ ID NO: 29594 - DNA, 65 bp, Mus musculus
agtccccatttggtgtaatagtgacagaacctctgtggccctgtgggaaatccgaatcacccaca

SEQ ID NO: 29595 - DNA, 65 bp, Mus musculus
catctgcaagagcaaatctctgggttcaaaggtcagtactacctaaaaccaggaatggcagtgcc

SEQ ID NO: 29596 - DNA, 65 bp, Mus musculus
gcagcccaacaactgttcctttagctcagatactggttcctcatccatgagattcatgagagacg

SEQ ID NO: 29597 - DNA, 65 bp, Mus musculus
ttgggtgttggaagcacccactctgttccctgtagctgggttcaccaacctctccagtgtttcct

SEQ ID NO: 29598 - DNA, 65 bp, Mus musculus
ctgagttcaagcagaatggagacacgagtttgtgaaggcacgagatcctagctcctgagttttgt

SEQ ID NO: 29599 - DNA, 65 bp, Mus musculus
cctgctctatgcgaaagaattcactctgctactctcggctgccaatgtgtgtctggaccccatta

SEQ ID NO: 29600 - DNA, 65 bp, Mus musculus
aatctcaggcaccagagaacgcaaagcagccactaccctgggattgatcttgggtgcatttgtaa

SEQ ID NO: 29601 - DNA, 65 bp, Mus musculus
gatgcttaactctgtgggctcgtagtcctctgaaagtggttgttttcctatgcacagtgagctca

SEQ ID NO: 29602 - DNA, 65 bp, Mus musculus
aataccgacagtatatggccggacttctggctcctccctatggtgttatggaaacgggctctaac

SEQ ID NO: 29603 - DNA, 65 bp, Mus musculus
gctccctacagttcttgtcttgacctggcttatgagaaaactcccatttggggactttatctccc

SEQ ID NO: 29604 - DNA, 65 bp, Mus musculus
cattcaggaaacgggcagagcagatgcttgaagcaaaatcacgctaacgacgccttgttcttcat

SEQ ID NO: 29605 - DNA, 65 bp, Mus musculus
ttccccttcacctcagccggatcctgaagctcaccctgtatgaccagagcaatccacacaggtgt

SEQ ID NO: 29606 - DNA, 65 bp, Mus musculus
agaatctggagtctggaggcgttttccgtaatggcacctgcgcttccaggatcagcacgctttga

SEQ ID NO: 29607 - DNA, 65 bp, Mus musculus
gaggatgcagagagggcaggagatgaacgggaggctcagtcagatcgcacaggctggcactagtg

SEQ ID NO: 29608 - DNA, 65 bp, Mus musculus
aggagcccgtgcaagcagaacctggctgcaagcaagtccctttcaccaagaccactactttctga

SEQ ID NO: 29609 - DNA, 65 bp, Mus musculus
gcagttttcgtgggtgaggaagttaccgcaaacccattgcagacctgttatggcaacatgacagt

SEQ ID NO: 29610 - DNA, 65 bp, Mus musculus
tatgcacaccaactacctgtctgcctgcagcttcaccaactctgacatgcagattctgacagcca

SEQ ID NO: 29611 - DNA, 65 bp, Mus musculus
acagctatgtaaagcaaagcctcaactgtctgagcaggcgttccatcaccttcctgtgtggcgat

SEQ ID NO: 29612 - DNA, 65 bp, Mus musculus
tgccccaccaatccctactgcatctgctacacggcccatttcaacacctacctggttctcatcat

SEQ ID NO: 29613 - DNA, 65 bp, Mus musculus
agcctcccaaacccgaatgaagggcaggtcagtgtgcactgcagagctcaggaaggcacaattga

SEQ ID NO: 29614 - DNA, 65 bp, Mus musculus
cacaggaacagcagggacgaacctctggctgtgaatgaggatccagggtgtcagcaagagacaga

SEQ ID NO: 29615 - DNA, 65 bp, Mus musculus
attgccttgagatgaccagcactggccacctcagagctgacatttctgcctctgtccttccttct

SEQ ID NO: 29616 - DNA, 65 bp, Mus musculus
gggcatttcggaaatccctcccgtgagcaggaccataaccaaagactccatctatgactcatttg

SEQ ID NO: 29617 - DNA, 65 bp, Mus musculus
gatatccagtggcctgcatctgtgagaccacaggtactcatcccttcctgatctccatttgtcta

SEQ ID NO: 29618 - DNA, 65 bp, Mus musculus
cttctgtggatacctgtgaaaactgtcattgggaggcctttccaagcagaaagccatggtaacca

SEQ ID NO: 29619 - DNA, 65 bp, Mus musculus
agaagacagagtcctgcagagtttgagtcccagatgcacccagacacacctcagttctgctcaaa

SEQ ID NO: 29620 - DNA, 65 bp, Mus musculus
tgtaggggaccaaggcttgttaaaggggctgatatcctctgatgcggatcaacagctctcacttg

SEQ ID NO: 29621 - DNA, 65 bp, Mus musculus
atatctgcatgaccatgacatctgagactcacggtgactttgatggccactgtgtaggttggcca

SEQ ID NO: 29622 - DNA, 65 bp, Mus musculus
tcgctcttgacgagactctgggagactttgcctttcctgatgagttcctgttcgacgtgtgggga

SEQ ID NO: 29623 - DNA, 65 bp, Mus musculus
acccctgaaaccgagtaagcctttgtgtcaagaagtgggagtagaaccagaaaggtggctgagtg

SEQ ID NO: 29624 - DNA, 65 bp, Mus musculus
atcctttaagtctctgagaggaggctgaagagtgttggggctcctgggacatacatgtagagttc

SEQ ID NO: 29625 - DNA, 65 bp, Mus musculus
gaatgaaggaaggcatgtctaataacagcaccaccagcatctcccaggccaggaaagccgtggag

SEQ ID NO: 29626 - DNA, 65 bp, Mus musculus
aggcctctacctgcccatctacctgctggactttgctgtcttcttcattgcacccttgctgggga

SEQ ID NO: 29627 - DNA, 65 bp, Mus musculus
caggcgtcagcatcaaagcaattccaagagttcacctactcctaagaccagttgtaaccaccgaa

SEQ ID NO: 29628 - DNA, 65 bp, Mus musculus
tcgtggttgttggagccatccttctcatcccaggagaaaagcccgtgaagaatgcttctggactt

SEQ ID NO: 29629 - DNA, 65 bp, Mus musculus
agtcggagtgcagaaaggctctcccaggagactccagcttacccacagatgtgcagctggtcaca

SEQ ID NO: 29630 - DNA, 65 bp, Mus musculus
aagcatagcgccctctggccacacagaaatgagtgctgaggcaaataaaaggcctgtgatattct

SEQ ID NO: 29631 - DNA, 65 bp, Mus musculus
tggaggagcaagcgcacagagggcatcgtgtaggtatcccaggtgatgagggattggggaaccat

SEQ ID NO: 29632 - DNA, 65 bp, Mus musculus
ggactacagctagcacagggaatttagcgatagggtgtcttgtgctacagtgattcttggactgt

SEQ ID NO: 29633 - DNA, 65 bp, Mus musculus
acctgaagtacggcgatcagtccaaggtcaaggagaaagcagaggagatctacaagctgttcctg

SEQ ID NO: 29634 - DNA, 65 bp, Mus musculus
aaaccactgcccgagatgggtcgctttctgccttccagctcccagagcacagtagtccttattct

SEQ ID NO: 29635 - DNA, 65 bp, Mus musculus
aagtctacccggcagttgggttctgaagcagctgacatgagaaaacggcagcagtcacaaaatga

SEQ ID NO: 29636 - DNA, 65 bp, Mus musculus
gtgtgtctgtcagtttacagtggatgagaggagtgactcagccctcactcattgtcttaagctat

SEQ ID NO: 29637 - DNA, 65 bp, Mus musculus
atctgctggttgcctttctttgtagtatcgttggtcctccccatctgcagggactcctgttggat

SEQ ID NO: 29638 - DNA, 65 bp, Mus musculus
atcttggtgaacttcatcctgtttatctgcatcatccgaatcctggttcagaagctacggccacc

SEQ ID NO: 29639 - DNA, 65 bp, Mus musculus
agatgcggaggacctttaaggagatcgtctgttgtcacggattccggcgaccttgtaggctcctt

SEQ ID NO: 29640 - DNA, 65 bp, Mus musculus
gcctattaccgaatctatgtcactgctaaggagcatgcccagcagatacagatgttacaacgggc

SEQ ID NO: 29641 - DNA, 65 bp, Mus musculus
gagtaaaggactctctcccaaaagaacactttaacacaggacctggaaggaagccacagagggtg

SEQ ID NO: 29642 - DNA, 65 bp, Mus musculus
gccctctgcttgcgatcatggtgtatgatgtctttgggaagatgaacaagcttatcaagacggtg

SEQ ID NO: 29643 - DNA, 65 bp, Mus musculus
cagtgacatcagccaggcatctgtggagttggccacaattcaagcaacgagatgttggagagata

SEQ ID NO: 29644 - DNA, 65 bp, Mus musculus; identical to SEQ ID NO: 3291

SEQ ID NO: 29645 - DNA, 65 bp, Mus musculus
atccaagttcctgaggagacctaccttatcctgaaggaccagggctttgcctttgactaccgtgg

SEQ ID NO: 29646 - DNA, 65 bp, Mus musculus
cataggagtagaagaggccagtgaactcagcaagctcaatgtctcaaagagtgtgtgaggcagcg

SEQ ID NO: 29647 - DNA, 65 bp, Mus musculus
gccatatcctagccttggataggaagggactactagacgccattggggcaggtgtgaggtatata

SEQ ID NO: 29648 - DNA, 65 bp, Mus musculus
aggagctcataccagtttgtgtgcagaggcaaagtcagcgtgaagggcaagggagagatgctaac

SEQ ID NO: 29649 - DNA, 65 bp, Mus musculus
gggctggttctgagtttctgctttgctactgagttctcgaggtgctttccatcccgaagtacact

SEQ ID NO: 29650 - DNA, 65 bp, Mus musculus
aacactgtgttcgactggaaccaccagatcattgccacctgcaaccacaatctgctgtttctgct

SEQ ID NO: 29651 - DNA, 65 bp, Mus musculus
cagatgaccaaggatggcttcctcatgtacctgctgtctgctgacggtaacgccttcagcctggc

SEQ ID NO: 29652 - DNA, 65 bp, Mus musculus
gtcgtaggaaggctatagggatgatcatagttgtgacagctgcctttttagtgagcttcatgcca

SEQ ID NO: 29653 - DNA, 65 bp, Mus musculus
catggaccagcaccataaggtagtctgtgctacaccagatgttaacacttagtacctagtcggtg

SEQ ID NO: 29654 - DNA, 65 bp, Mus musculus
ctcagaagccatacttcccatggcctccagctgttgcactgaggtgtctcatcatgtttccggaa

SEQ ID NO: 29655 - DNA, 65 bp, Mus musculus
gagacagtttgcaatgatgtcttggctctgcttgacaagttccttatcaagaactgcaatgattt

SEQ ID NO: 29656 - DNA, 65 bp, Mus musculus
gactctgtttgctggctatacagacaacttggtgcgagtatggcaggtaactattggtacccgct

SEQ ID NO: 29657 - DNA, 65 bp, Mus musculus
agaagtcgcaggagaagatggagctgaccagtaccccttcacaggaatcagcaggaggagatctt

SEQ ID NO: 29658 - DNA, 65 bp, Mus musculus
cctgtagccatgtctggagaagaaaaccaaggatgggaatcagcagtgacaaggatttgggcaac

SEQ ID NO: 29659 - DNA, 65 bp, Mus musculus
ttaagccccaccatggcacccaagctcagcttagaggttcgaaaactcagcaatggcaggttatc

SEQ ID NO: 29660 - DNA, 65 bp, Mus musculus
tgctggaggagttcaagacggagaagaggctgtgcaagatgttctacgccatcacgctgctcttc

SEQ ID NO: 29661 - DNA, 65 bp, Mus musculus
agttgatgttcatctcaggtggcatttgcaggagaccagaatgatgcacatgactgtggtggtct

SEQ ID NO: 29662 - DNA, 65 bp, Mus musculus
tcagtcctcatcaatcatcctcctcgatacccttctcactgaaaacgatggcgacaaagcggaag

SEQ ID NO: 29663 - DNA, 65 bp, Mus musculus
ttgacatacattggacatagccattccccacagcagatgctggacagcctgggaagttgagcctt

SEQ ID NO: 29664 - DNA, 65 bp, Mus musculus
cagaacgaaaacaaggttggtgagagagggtaggaacatgaccttccactgtggacagaagatcc

SEQ ID NO: 29665 - DNA, 65 bp, Mus musculus
tatctggagccttactgatgaggagctcatggcctgtgaccaagagaaggacagtagctcagagt

SEQ ID NO: 29666 - DNA, 65 bp, Mus musculus
ctggagatggttctacatgttgctggaggacttttaccctcagagagatcatatcacaccctgcc

SEQ ID NO: 29667 - DNA, 65 bp, Mus musculus
gacggcccaattgaaatcttgaggctgaataatatgatggtcaccaaagtttggacccctgatac

SEQ ID NO: 29668 - DNA, 65 bp, Mus musculus; identical to SEQ ID NO: 23716

SEQ ID NO: 29669 - DNA, 65 bp, Mus musculus
gccatcctcccagcataaatggatccttagcaaggcaatgtggatgcagagttgccatatttggc

SEQ ID NO: 29670 - DNA, 65 bp, Mus musculus
ggacagctggaagcttctgactcaggaatccagaacttggtctaccttagccgtttacgcagtca

SEQ ID NO: 29671 - DNA, 65 bp, Mus musculus; identical to SEQ ID NO: 3783

SEQ ID NO: 29672 - DNA, 65 bp, Mus musculus
agccctttgagcatcttctgcagagaatcgcccgaagacccaagcctcagcagttctttggatta

SEQ ID NO: 29673 - DNA, 65 bp, Mus musculus
ggaacgggagacaaccgtgcgaaagacagccaccaacaagagagcaccaacaatgacgaagacat

SEQ ID NO: 29674 - DNA, 65 bp, Mus musculus
tttcctggcaacggagatgaacagcccctgactgaaaacccccggaagtacgtcatgggtcactt

SEQ ID NO: 29675 - DNA, 65 bp, Mus musculus
cccctctgctcgccgctgtcagtctcttggtaaatggcaataaagacgattctctgttggtgtga

SEQ ID NO: 29676 - DNA, 65 bp, Mus musculus
tggcccagacgtcgaggatgccggcgacgagactcctgacgtggaccctgagctgctgaggtact

SEQ ID NO: 29677 - DNA, 65 bp, Mus musculus
tcagaagacctagagaagtcctgagaccatgtccactgtgcacgtgtgtcctgtgctgtaattta

SEQ ID NO: 29678 - DNA, 65 bp, Mus musculus
tagactggaccgtggttgtttaggagaaaagatcacaggcctcttactgtgctgtgcattaagag

SEQ ID NO: 29679 - DNA, 65 bp, Mus musculus
aagacactcagacggaatgttcaccagcgagctcagccgcttgcaggacagtgccaggctgcagc

SEQ ID NO: 29680 - DNA, 65 bp, Mus musculus
aggaagagagctgtcagtgaaatacagcttatgcacaacctgggcaaacacctggcctccatgga

SEQ ID NO: 29681 - DNA, 65 bp, Mus musculus
cggaagcggaggagtgtcaatccctatctacaaggaaagaggttggacaatgttgtggcaaagaa

SEQ ID NO: 29682 - DNA, 65 bp, Mus musculus
cctgggcatagcaccctggccaccctgtgagatgccaacgagacctgaataaagactgtcaatca

SEQ ID NO: 29683 - DNA, 65 bp, Mus musculus
gccgactcaggtttcagtgactgacctagcccagagcaggactggactctgaccttagcttgctt

SEQ ID NO: 29684 - DNA, 65 bp, Mus musculus
gatgctgctctgggtgctctttgtgatcctcatcctcaccagtggctcccactgctcactgcccc

SEQ ID NO: 29685 - DNA, 65 bp, Mus musculus
agttcccaggtctaagtctgaatggcctcaagaagacaactgcagaccgagcagaagaagttctg

SEQ ID NO: 29686 - DNA, 65 bp, Mus musculus
ccgctcctcagcgctttgggaagaagtagcatcgtcagctgtgatgcctgcatgcaaaaccactt

SEQ ID NO: 29687 - DNA, 65 bp, Mus musculus
cttaagaacctgcagagcctggaccccagccatagaataagtgaccgggactacatgggctggat

SEQ ID NO: 29688 - DNA, 65 bp, Mus musculus
agaagccagctctgttctttgtggattttctggagaccctccttcctacccttgccctcatgcat

SEQ ID NO: 29689 - DNA, 65 bp, Mus musculus
cacggggcataagcctcattactacttgaactttccaaaacctagcgaggaacgtgcaatgcttg

SEQ ID NO: 29690 - DNA, 65 bp, Mus musculus
gaatccaatggaagcgggagtccttttgaccctgtctttgaagttgagcctaaaattcccagtga

SEQ ID NO: 29691 - DNA, 65 bp, Mus musculus
aactggccaagtacttcttggcagagctgctgtccgagcccaaccagacagagaatgatgccctg

SEQ ID NO: 29692 - DNA, 65 bp, Mus musculus
gtccctctccacacacaggtcacagcctgtagagcccttcatgtgttctgaaatgtgtagattgt

SEQ ID NO: 29693 - DNA, 65 bp, Mus musculus
gcgacactacatcaatctcatcaccagacagagatatggcaagagatccagccctgagacactga

SEQ ID NO: 29694 - DNA, 65 bp, Mus musculus
cagcaaaggaattcattgcttggctggtgaaaggccgaggaaggcgagacttcccagaagaagtc

SEQ ID NO: 29695 - DNA, 65 bp, Mus musculus
ggaggagtaaggttagagtcaggctttaggtctaggctgatgtaagccctgtgtatcctatccca

SEQ ID NO: 29696 - DNA, 65 bp, Mus musculus
gaattcggcacgagctcgtgccggtcctcaccaccaagaccatgctgtcttcaggcaccatctgc

SEQ ID NO: 29697 - DNA, 65 bp, Mus musculus
acagctatgtagtagccactctgcacttccagaagcactgaggccggtctgcgagaaacccaacg

SEQ ID NO: 29698 - DNA, 65 bp, Mus musculus
tgggaatctgagtacctgcatgctgggcacgtacacacaagacctcaacaagtttcacaccttcc

SEQ ID NO: 29699 - DNA, 65 bp, Mus musculus
tatgaaactcagctccgcagatacatcaacacactgaccaggcctaggtatgggaagagagccga

SEQ ID NO: 29700 - DNA, 65 bp, Mus musculus
tttccatgggaaatggagcagcagagtcctctggcttctcagtccatgtccacaaccagacacaa

SEQ ID NO: 29701 - DNA, 65 bp, Mus musculus
ctagattcctgaagcccagggtgatagtgtttgctcctactgggtgggatttcaactgtgagttg

SEQ ID NO: 29702 - DNA, 65 bp, Mus musculus
aaccaaaacctgaactcactacgaagctttgtcttgggcccactggtgctgtacctgttggtggg

SEQ ID NO: 29703 - DNA, 65 bp, Mus musculus
tttcagctctggcccacgcgcagagaatgggcaacaaaacgctttgtgtagtgtgtcttgacatc

SEQ ID NO: 29704 - DNA, 65 bp, Mus musculus
ttctgttagctggcttcgtgtcgctgttccgaatccgttcagtcatcaagcagcaaggaggtcca

SEQ ID NO: 29705 - DNA, 65 bp, Mus musculus
gccctgcacagtataaggcttctacagtgacacaaggatctcacaataaggcctgtaccatgctc

SEQ ID NO: 29706 - DNA, 65 bp, Mus musculus
ggtactgggtaccagtttcctcctgaccggttttgtggctctcttccatatccgcaaaatcatga

SEQ ID NO: 29707 - DNA, 65 bp, Mus musculus
ccttgttatgcgcaagtttctacagaggagttcacttactcagagtggaccacagccaaggactg

SEQ ID NO: 29708 - DNA, 65 bp, Mus musculus
ctgggaacaggtcattcagcaagtaaccaagaaaaagcaagagctgggcaaaggcttacccaggt

SEQ ID NO: 29709 - DNA, 65 bp, Mus musculus
aagatggctccttgggatggagatagtggagtaagttgctagcatcacgttgagatatggcaggc

SEQ ID NO: 29710 - DNA, 65 bp, Mus musculus
ggagcgagaatttgaaagtaaccctagagaagtgggacaggtctacttgtaccttcaagcaagcg

SEQ ID NO: 29711 - DNA, 65 bp, Mus musculus
tccccactggcatttgctacgtcatgccttctgatttgcggacagaactgagtaaaaggatggcc

SEQ ID NO: 29712 - DNA, 65 bp, Mus musculus
gccccgaaatgggaccctgaacaaacactccggtattgacttcaaacagctcaactttctggcaa

SEQ ID NO: 29713 - DNA, 65 bp, Mus musculus
acttcctgaaggtgctgagggctggggagaagctcttcttcctagcccagagacatacttgaagg

SEQ ID NO: 29714 - DNA, 65 bp, Mus musculus
tgtcaccaatcgcagcaaagggatggcagagaagctccggccagaagacattactcagatccaac

SEQ ID NO: 29715 - DNA, 65 bp, Mus musculus
ctttagatgtccagttggtataccatgcattctgttaggtgattttgagagcataccttcccttt

SEQ ID NO: 29716 - DNA, 65 bp, Mus musculus
tactctgctaaggggccatgtgtggaaagaaaggccaagttgatgaccgccaacagcccagaagt

SEQ ID NO: 29717 - DNA, 65 bp, Mus musculus
ggagagtgacaaggactaaggcctaggtctgatacactgacagcccaggaatagacttgagagcc

SEQ ID NO: 29718 - DNA, 65 bp, Mus musculus
tgggctaccctgttcctgagaaccagcatccctaccatcaacatggagaacaagaccacatggtt

SEQ ID NO: 29719 - DNA, 65 bp, Mus musculus
ggaagaatgtcagtatgtgggaatgtatctctctgtgtgtacttatgtgtgtgacgagtgtgggg

SEQ ID NO: 29720 - DNA, 65 bp, Mus musculus
ctgctgctgctgaccctgctagttttggccatgtggaaggctggcttcttcaagcggaatcgacc

SEQ ID NO: 29721 - DNA, 65 bp, Mus musculus
atacagacactggggaccaaacgctgggattggctcaaaacagggctgtgttgctccaatggttg

SEQ ID NO: 29722 - DNA, 65 bp, Mus musculus
agaggttctgtagaatccgagcctagcaccccaaagtcatgcacccagtatcctcttgtatgact

SEQ ID NO: 29723 - DNA, 65 bp, Mus musculus
catcccacctcatgcggctttggccttgcacacgtctccccctgtgaatgtagcctccatcatca

SEQ ID NO: 29724 - DNA, 65 bp, Mus musculus
aaacctcggcacagcaaccttgaatatacagtggcccaaggagattagcaatggcaaatggttgc

SEQ ID NO: 29725 - DNA, 65 bp, Mus musculus
gtctgggtgcctcatcttgtgaagccttgtgaacgcagcctcatgcggttaatttgaagtgctgt

SEQ ID NO: 29726 - DNA, 65 bp, Mus musculus
gggcctgtagaataggatcacttcccagaaagggtcaacaagaatgtgtcacttaggatgcctct

SEQ ID NO: 29727 - DNA, 65 bp, Mus musculus
ggaacaatgacaaccccctcttcaagagtgctacgacaacggtcatgaaccccaagtttgctgaa

SEQ ID NO: 29728 - DNA, 65 bp, Mus musculus
tagttgtggggacatcccataagtagtttcaagagggaaactgggtattacttggccaccaggat

SEQ ID NO: 29729 - DNA, 65 bp, Mus musculus
cgaccgtggtggagtcgtctgagaaggcctacagcgaagcccacgagatcagcaaggagcacatg

SEQ ID NO: 29730 - DNA, 65 bp, Mus musculus
gagcgcgagagatggagatggacaaacggatttatttagagctgcggaacaggacgccctctgat

SEQ ID NO: 29731 - DNA, 65 bp, Mus musculus
tgggatgtctgtcggagcacaactggaatacccaactgcagcccatcactgctgtgaatgtatgt

SEQ ID NO: 29732 - DNA, 65 bp, Mus musculus
aaagctggtaaagaagcgtgctgcacagcggagcacagagaccgccctgtaccgaaagatgctag

SEQ ID NO: 29733 - DNA, 65 bp, Mus musculus
ccactttgcttctgaacgccgtcattagaccacttatgtcatgagtactccaacccaggtttcac

SEQ ID NO: 29734 - DNA, 65 bp, Mus musculus
taaagaaaaccagtggggaaggaaggtaaagaggccactcaacctccacctggtaagggacaaag

SEQ ID NO: 29735 - DNA, 65 bp, Mus musculus
actgtgggaggattaagtcccgtacaggcccagagtgacactttcccaagatgcgactgttcttc

SEQ ID NO: 29736 - DNA, 65 bp, Mus musculus
tacagcctcctttcacagtctgctgcagaggacatccctccgttctgggctgttagcaccactca

SEQ ID NO: 29737 - DNA, 65 bp, Mus musculus
ggtaattgagagccgacgttgcttcaaattccctgaaggcaagcccctttgggtttagggtatgt

SEQ ID NO: 29738 - DNA, 65 bp, Mus musculus
gggaaattcacacgtgtagacaatggaaaggagctgattgctgtccgagaggtttctggtaatga

SEQ ID NO: 29739 - DNA, 65 bp, Mus musculus
cactgaaattcacccaacagaggtctccggacgttcacagtggaagatgagctcctttgaaatgc

SEQ ID NO: 29740 - DNA, 65 bp, Mus musculus
ccatgacattgggcgacattgtctacaagagagtcagcaagagaatttagacaaggctatatttc

SEQ ID NO: 29741 - DNA, 65 bp, Mus musculus
gccagaagtcagcattatgcagtctctgcctctacttgtcactcaacgttgcaccaaattggctc

SEQ ID NO: 29742 - DNA, 65 bp, Mus musculus
attccctgccgtttcgacttccccgatgagctcagaccggctgtggtacatggcgtctggtattt

SEQ ID NO: 29743 - DNA, 65 bp, Mus musculus
agggttccagtctagtgccaccgtcattgtcattgccttcagataagagagaactcagggatccg

SEQ ID NO: 29744 - DNA, 65 bp, Mus musculus
gccagtgctgtatgccatgctggaccacagccgaagcaccaaagctgccagtgagaagaaatcaa

SEQ ID NO: 29745 - DNA, 65 bp, Mus musculus
ttaaggatctcgaagggaagtggcgcctgatggaaagccacggctttgaggagtacatgaaagag

SEQ ID NO: 29746 - DNA, 65 bp, Mus musculus
actgcggatagacaggcacaccgccaaggagccagagagcatggcgcaggggactgtgtggtcca

SEQ ID NO: 29747 - DNA, 65 bp, Mus musculus
cggcctactgatagcaccctcctgtgctgcagcctttctcacctggaagacagctcctcctcgaa

SEQ ID NO: 29748 - DNA, 65 bp, Mus musculus
ggggacctggaaactggtctccagtgaaaacttcgagaattacgtgagggaactgggagtggaat

SEQ ID NO: 29749 - DNA, 65 bp, Mus musculus
aacagagcccgcttgaggcaactactcaatgccaagttatctcgtagaaggaacgggtgtttgtc

SEQ ID NO: 29750 - DNA, 65 bp, Mus musculus
cgtctaagccgcacgtggagatccgccaagacggggatcagttctacatcaagacatccactact

SEQ ID NO: 29751 - DNA, 65 bp, Mus musculus
ctaccaggctgggcttggaggggctacgacccaccaataaaagtgtttcatggatcaccactgct

SEQ ID NO: 29752 - DNA, 65 bp, Mus musculus
ggaaaatgagctgcaagtgtgctaaatgtatcagtgcagaagctggattctgacccgagctctgc

SEQ ID NO: 29753 - DNA, 65 bp, Mus musculus
gccatctacacagtgaggcacagtgagtggcatgtcaacactgactactcctatggcttcgccta

SEQ ID NO: 29754 - DNA, 65 bp, Mus musculus
ggtccttggggatttcccattggcctctttgctgtggacagattccaatctacatctacagacac

SEQ ID NO: 29755 - DNA, 65 bp, Mus musculus
ggctcaggcacttctacaacagaagacgaaggtcgcttaggcgatacccatgaagaatccaagtt

SEQ ID NO: 29756 - DNA, 65 bp, Mus musculus
agttgccatggagaagaaatcaggagcccgtatactgtgcttccctgggactttgcccctaggag

SEQ ID NO: 29757 - DNA, 65 bp, Mus musculus
caggacaagttaagggtcatatgctgcaaaggaaacctcgtgaaggagtcaggcactgagcagca

SEQ ID NO: 29758 - DNA, 65 bp, Mus musculus
gcagtatctacagaagagaccatgcggctaccacagccttatcaagacaccaagactgttcttcc

SEQ ID NO: 29759 - DNA, 65 bp, Mus musculus
aaaggactgatagtcgacacagtgtaactggaggagacacagggctttgtgacgggaacagaacc

SEQ ID NO: 29760 - DNA, 65 bp, Mus musculus
ccaagttctgaaaacaaggtatctattctgatctgacactggatctgcttatcccatttagtgtg

SEQ ID NO: 29761 - DNA, 65 bp, Mus musculus
gctgtagtgatggcgatgccaaactccctgctgtttctggtcctttaagccacaaagtgacttac

SEQ ID NO: 29762 - DNA, 65 bp, Mus musculus
tcgggcacatccatggtatatctcaaggcatggcttaacaagaaatggacaaggaaagtctgctg

SEQ ID NO: 29763 - DNA, 65 bp, Mus musculus
tctctttgcagaaacagatggagcatgccaaccagcagaccagcttctcggactcatcttctctg

SEQ ID NO: 29764 - DNA, 65 bp, Mus musculus; identical to SEQ ID NO: 23716

SEQ ID NO: 29765 - DNA, 65 bp, Mus musculus
attccctccagagcaccacagggacactgtgatcagcccaagaatgttctgggttcaaatccagg

SEQ ID NO: 29766 - DNA, 65 bp, Mus musculus
cgtgtggaaggacataccgtcttctgtggcttttgagtgtacaaagagaatcactggatgggacc

SEQ ID NO: 29767 - DNA, 65 bp, Mus musculus
acaggggtgacaagcctcacttctgctgctcctgtcgcctgctgagtgacagtgctgaggttaaa

SEQ ID NO: 29768 - DNA, 65 bp, Mus musculus
actggtttgattcactggagcctgctgggaacgtgacctcatatccctgaagctttcgtgatcac

SEQ ID NO: 29769 - DNA, 65 bp, Mus musculus
aagcctcgataccaacgaggtgacgcaggagataacagatgagaccaggatcttccgagtactgg

SEQ ID NO: 29770 - DNA, 65 bp, Mus musculus
ctagctgttagagagggatgaagcagggtttggggagtgaggcaggaacagatgtctttcccatc

SEQ ID NO: 29771 - DNA, 65 bp, Mus musculus
agagtctggaagctgaagaagccaagaggaggttaaaggagcagtctatctttggtgaccagcgg

SEQ ID NO: 29772 - DNA, 65 bp, Mus musculus
aatgggacttgagtgaggacaagacttcctctgccttgagtgctcctgttaccccagatgtagca

SEQ ID NO: 29773 - DNA, 65 bp, Mus musculus
gactgtccccagatgtcaagatccactgtgtttgagtttgtttgcagttccctcagcttgctggt

SEQ ID NO: 29774 - DNA, 65 bp, Mus musculus
gggtggtgatgaggatgtagatttaccagaagtagatggagcagatgatgattcacaagacagtg

SEQ ID NO: 29775 - DNA, 65 bp, Mus musculus
acgctcctgagtcatagcttcacccttcaaaccctgctcacctgtgccactcaagatgatctagt

SEQ ID NO: 29776 - DNA, 65 bp, Mus musculus
ttattcgagagatacgccagttccagcagaccgcttaccgcatagaccagcagccaaaggtcata

SEQ ID NO: 29777 - DNA, 65 bp, Mus musculus
ttatgtgtgagagtcatcaatttgttcaagggtggggaagtgtctgcaaggcgtcctgagtttat

SEQ ID NO: 29778 - DNA, 65 bp, Mus musculus
tatccgttaagacgtcagctggaccgactaacctgcggattgagtaccaagatgggaaattcaga

SEQ ID NO: 29779 - DNA, 65 bp, Mus musculus
ggtctctgcacacccagtcccactaaacacaggcgtcagattccaggttcatgtggacatttcta

SEQ ID NO: 29780 - DNA, 65 bp, Mus musculus
ggtcgggaagtggatgcttatccaagggccgcagatgtagctcccttgtgtccgtttcctgccta

SEQ ID NO: 29781 - DNA, 65 bp, Mus musculus
accttcttggtgcgcgacagtcgccaacggaactgcttcttcgcgctcagcgtgaagatggcttc

SEQ ID NO: 29782 - DNA, 65 bp, Mus musculus
cagaaacacaaagcagtccaaccaaaggggttctcatgtatcagccatcttctgtaagggtgccc

SEQ ID NO: 29783 - DNA, 65 bp, Mus musculus
tcagatgaccaggacctcctgcactcctcccggtttttcccgtatacctcctcgcagatgtttct

SEQ ID NO: 29784 - DNA, 65 bp, Mus musculus
ctgaagggttacatttgctttagcaagtgtttggggtcaaactatgtccaggaacaaggctggga

SEQ ID NO: 29785 - DNA, 65 bp, Mus musculus
tcagtgcagcttgcgtgccatcttgtcctcttgacggtgaggaggttcagaactgaatgtctgta

SEQ ID NO: 29786 - DNA, 65 bp, Mus musculus
agagccttggcaagaaggccaaacgctttctgggccgcatcgtggctcgcaacagccgcaagatg

SEQ ID NO: 29787 - DNA, 65 bp, Mus musculus
tccacccttgactctgatcctgcagcctctatctctactctggatggtatgaagttgcaattggg

SEQ ID NO: 29788 - DNA, 65 bp, Mus musculus
aggactcctagagaaccacagaggacttgtacttgtgaagtagccaaaggaagcactcccaagtc

SEQ ID NO: 29789 - DNA, 65 bp, Mus musculus
gattagactgacaggaagccaggcttgacatggacaagaaggatgtgttggccacacagcagggc

SEQ ID NO: 29790 - DNA, 65 bp, Mus musculus
atttgtgccaccctgaaattgggactctaaattgagtatcctttggtttctgaagacgttcaacg

SEQ ID NO: 29791 - DNA, 65 bp, Mus musculus
tatgtcggaatacatcaccacagctcttcgggacaaccgaactaccagacggttctatgactccg

SEQ ID NO: 29792 - DNA, 65 bp, Mus musculus
ctgtggattttactggtcccagctttaggttctttacgacactaacaggactgcatagaggcttt

SEQ ID NO: 29793 - DNA, 65 bp, Mus musculus
tctgcttctttctcacagtcacagtcacttcacagcttagccttgggcttcccatcacttccagg

SEQ ID NO: 29794 - DNA, 65 bp, Mus musculus
gacagtcaccagctcttcattgggaacctgccacatgaggttgacaagtcggaactgaaggattt

SEQ ID NO: 29795 - DNA, 65 bp, Mus musculus
tatgactttgaggctctggaagaggacgagctgggattccgaagcggagaagtggttgaagtcct

SEQ ID NO: 29796 - DNA, 65 bp, Mus musculus
aagaccgacacctctgacaagaagttgcagctgatcaaggactatcgggagaaagtggagtcgga

SEQ ID NO: 29797 - DNA, 65 bp, Mus musculus
ttaactcttgtcttctgtgagttttccgtcctctgtagtcacgtgcctgcacaccgttctctcca

SEQ ID NO: 29798 - DNA, 65 bp, Mus musculus
aatggcagaagtgacggatcactagatgatggtgatggcatccaccgagctgtagataacgagag

SEQ ID NO: 29799 - DNA, 65 bp, Mus musculus
cagagaaagattgtgacgtgctggtcggttttaaagctgtgtatcggatcaactttgctgtggcc

SEQ ID NO: 29800 - DNA, 65 bp, Mus musculus
ctgcttctgctgctcatcctgttgctgttcgtggctgtgctcctgtactctcttccgaactattt

SEQ ID NO: 29801 - DNA, 65 bp, Mus musculus
gacaaccggagaataattcgctatccggacagtcatcagcttttcgttggtaacttgcctcatga

SEQ ID NO: 29802 - DNA, 65 bp, Mus musculus
caccagttgtagtagactgggcctctggagtgtctcccaaacctgacccaaagaccatcagcaaa

SEQ ID NO: 29803 - DNA, 65 bp, Mus musculus
gatcaaagggaagacttctgctcttaactttaggagcccactgatctaagtgtactagttacctc

SEQ ID NO: 29804 - DNA, 65 bp, Mus musculus
acaatacagcacctactcccttttcagccagcgagcaggcaaccagaacttaggggaagccagct

SEQ ID NO: 29805 - DNA, 65 bp, Mus musculus
cccagtgcacacccaggagattgaggaaaacttgcttagcttagaggtggccatcagacaactgg

SEQ ID NO: 29806 - DNA, 65 bp, Mus musculus
aggaatttagccataagactagttcagggctaaccaccaagcttccctttgactggctccaaagg

SEQ ID NO: 29807 - DNA, 65 bp, Mus musculus
gaaaacttcttgggaccagcaagagataaatgagcttgccttccaaacttgttgaactaagttca

SEQ ID NO: 29808 - DNA, 65 bp, Mus musculus
ctgatgtcagaaaagggacaacggcatagtgactcaggaagctcacggtctctgaatagttcctg

SEQ ID NO: 29809 - DNA, 65 bp, Mus musculus
gcgacgctaatgcagcttttgccttggttcttcctagtgcctacagtgggaaaacttcactccaa

SEQ ID NO: 29810 - DNA, 65 bp, Mus musculus
tcacagagctgtgctatttgttcgttaggtattgctcaggaaagtccaaaagaccagtctaatgc

SEQ ID NO: 29811 - DNA, 65 bp, Mus musculus
aggtccaagctccgaagacaggaaggtatctcccgcttctacatcatccaagtggtgtttcgaaa

SEQ ID NO: 29812 - DNA, 65 bp, Mus musculus
tttgcaccagtcccacaaatccccagttgtaggggagaggcagtccaccacctagtggtaagaaa

SEQ ID NO: 29813 - DNA, 65 bp, Mus musculus
aagagctgagttggcattggaggcaagcaaaagggaggactcccagagctttgggatccagttgt

SEQ ID NO: 29814 - DNA, 65 bp, Mus musculus
ccccaacagctctgcatccaagaagcagtatgtgtagggatctggggctaatgtcactcaacaga

SEQ ID NO: 29815 - DNA, 65 bp, Mus musculus
gaagtgccaaaccaggagcagattccaggggaaggcttcatccacatgcactatagccagaagcc

SEQ ID NO: 29816 - DNA, 65 bp, Mus musculus
tgaaaaggtaaccaagcaagggctgtctgctgagaaggcaccctcactctgtccggagctgacaa

SEQ ID NO: 29817 - DNA, 65 bp, Mus musculus
ttcacagtggtgactctaaacgatgcccaaggcagaaaccacccagtcaaacactgcaatggcca

SEQ ID NO: 29818 - DNA, 65 bp, Mus musculus
tgccaccggaaggttcctattccacgatgatatgccttagtgtctccccttgaattctgtggctc

SEQ ID NO: 29819 - DNA, 65 bp, Mus musculus
aggtctttgggaactgaagaagcactcagtggtatccagacgagatctgcaagctctgtgctgca

SEQ ID NO: 29820 - DNA, 65 bp, Mus musculus
gagcctcagtcactgcccgactatcagtttgaaaagacggagttgcttcctaaggcaagagtgtt

SEQ ID NO: 29821 - DNA, 65 bp, Mus musculus
atgtgttctacttcctctacaatgggtaccacctaccctgggtactgaaatgtggcattgacccc

SEQ ID NO: 29822 - DNA, 65 bp, Mus musculus
agagctggagaaagaagcggagcactcctagggagcatccagaaggccatatgaccaagaggatg

SEQ ID NO: 29823 - DNA, 65 bp, Mus musculus
ccgtatgtgatctccaaaggaggtcaccctcaagatgagagcgtgatcctaacaaaggccgggat

SEQ ID NO: 29824 - DNA, 65 bp, Mus musculus
ttactacaagcatgcaagggtctactagcgctgggatggtacacagggcttctacctactgcagg

SEQ ID NO: 29825 - DNA, 65 bp, Mus musculus
gatgagcgtttctgcggcatcaccgaggaggtgggctatgcaatcttctcttccgtatgctcctt

SEQ ID NO: 29826 - DNA, 65 bp, Mus musculus
cccaggcacatgttctcagcaataatgcagttgcagaactttcaggttgtgtcttccagatccag

SEQ ID NO: 29827 - DNA, 65 bp, Mus musculus
aggtccctacgcgtccgaaccacctcagatggaggttactctttcaagtatgagatggtacccaa

SEQ ID NO: 29828 - DNA, 65 bp, Mus musculus
tctaaatctctgacgcatggcaagtttgtcaccaaagaccaagccacatgcagatgggctgtgac

SEQ ID NO: 29829 - DNA, 65 bp, Mus musculus
ataccagcaaacggatgcggtgacaaatggcaccaatgcctgtcagtctgaaagaatggggtgag

SEQ ID NO: 29830 - DNA, 65 bp, Mus musculus
catgaccagtggaaagaatttggcctggatttggttgagttatcccattacgatgtcttgctgtc

SEQ ID NO: 29831 - DNA, 65 bp, Mus musculus
agagacacacgcctccaacttcaggtggttaacagcttgaaagcaaatgagtggccagagacagg

SEQ ID NO: 29832 - DNA, 65 bp, Mus musculus
gtctctcccgagaaagaagttcctcaagtaatgaaggcggaagtagaagggtgggcagattagga

SEQ ID NO: 29833 - DNA, 65 bp, Mus musculus
ggagctaattgtgtaccaccagtccagtgttcacatgcattcttgctacctggttgatggcctct

SEQ ID NO: 29834 - DNA, 65 bp, Mus musculus
cccttttctgtgcgcctgttctgaagccaacttaaacctgtccacatcttcactaccattcgccc

SEQ ID NO: 29835 - DNA, 65 bp, Mus musculus
ggcagtgtccacagaagagaccttgacctgttacagcaggctttgaaagtgctttagagacttgg

SEQ ID NO: 29836 - DNA, 65 bp, Mus musculus
tggccagcggaaccagacccaacagagcaccctccactatgatcaatcttcagagcctcacatct

SEQ ID NO: 29837 - DNA, 65 bp, Mus musculus
taagtgtgtcctggcagaggtgccacggcaggtggtagagtactatgccagccaaggtatcagtc

SEQ ID NO: 29838 - DNA, 65 bp, Mus musculus
aaccagaagcggttcagtgagtttatgaggcagtacctggtcctgagcatgcagtcaagtcaacg

SEQ ID NO: 29839 - DNA, 65 bp, Mus musculus
ccccagctgaagaagaagtacgatgtggacacattagacatggtctttcttgaccactggaaaga

SEQ ID NO: 29840 - DNA, 65 bp, Mus musculus
gcagatcctggttgactgtagagacaccctgaagtacggggttcgcacaggtcaccctcgatttt

SEQ ID NO: 29841 - DNA, 65 bp, Mus musculus
acaatgtcatctattccttatcagcctactcccactctggggctcaatctgggcaatgaccccga

SEQ ID NO: 29842 - DNA, 65 bp, Mus musculus
aagatcaaacctaccagccggtgtacttcgtgtcagagagcttcagtgatgccaaggacaagctc

SEQ ID NO: 29843 - DNA, 65 bp, Mus musculus
attacacagactggttgcaccctgaggaccctactcacctgagagatgccatgagtgcagtggta

SEQ ID NO: 29844 - DNA, 65 bp, Mus musculus
aataagatgctacgtgctagtagctctaagctgtctgagccctttggccctcagtcccacccata

SEQ ID NO: 29845 - DNA, 65 bp, Mus musculus
tgggaaacccatcgaagtcaacaatggacttgggaaaccacaggcaaagaacaagaagcctccgc

SEQ ID NO: 29846 - DNA, 65 bp, Mus musculus
ttgagaaagcccaggacttagctgaagaggttggcaataagctgagccagctcaagctgcattgc

SEQ ID NO: 29847 - DNA, 65 bp, Mus musculus
tgccaggcaattctggaaggttctctttggtatgtcccctgagcagagcacaaggatggggtggg

SEQ ID NO: 29848 - DNA, 65 bp, Mus musculus
agtttggtggaggctgtgctcatctccgaaggcctaggtctctttgcccaagacccacgatttgt

SEQ ID NO: 29849 - DNA, 65 bp, Mus musculus
taccgacttaacgccttgaggaaatcgccttttgcgagtgggtaatgcggaaagcccgacagatt

SEQ ID NO: 29850 - DNA, 65 bp, Mus musculus
ctagtcatcagcaagatgaaccagctattgtccaggactcctgccctgtctccacagagaccttt

SEQ ID NO: 29851 - DNA, 65 bp, Mus musculus
tatcgtcctggagaacaatgtggacggtgtcttcgaggtggctctctactgcaatgtcctcgtgt

SEQ ID NO: 29852 - DNA, 65 bp, Mus musculus
tcagccactatgccctcaattcagtgcaaacacaggtcgcccaatgggggactgtttcgacagag

SEQ ID NO: 29853 - DNA, 65 bp, Mus musculus
atcatttgtgccatttaggatttgccaaaggctacagccaagccctggaactcagctgtcccacc

SEQ ID NO: 29854 - DNA, 65 bp, Mus musculus
gaaagtggcaattccactgtctgataagggcttctgaggaaggtcaccaggtttgtatggaaagg

SEQ ID NO: 29855 - DNA, 65 bp, Mus musculus
tcccacttttggggatgatcagtgcttgcttcacggcagcaaatcctacttcttcaggcagccca

SEQ ID NO: 29856 - DNA, 65 bp, Mus musculus
atcttccatggccagcttatgaccttagcagcttaggtcttggtgtgggctgggatcttgctcat

SEQ ID NO: 29857 - DNA, 65 bp, Mus musculus
tccatggttggctggtatgatctagggaatagcggcacctagctcccaggtctctacagggccat

SEQ ID NO: 29858 - DNA, 65 bp, Mus musculus
ggaaggcagccaagcagttgggttgtatcatggcagcattcattctctgctggattccctatttc

SEQ ID NO: 29859 - DNA, 65 bp, Mus musculus
taacatcatggtgctggtgtctacattctgcaaggactgtgttccagaaaccctatgggagctgg

SEQ ID NO: 29860 - DNA, 65 bp, Mus musculus; identical to SEQ ID NO: 23716

SEQ ID NO: 29861 - DNA, 65 bp, Mus musculus
cagcctccaagtggtccaagatccaaattgtgacaaagcagacaggcagtgaatgtgtgactgcc

SEQ ID NO: 29862 - DNA, 65 bp, Mus musculus
ccaaagatgcctgtacaagcttctagctgtgaggaggtgctggacttacctaagttgccagtgcc

SEQ ID NO: 29863 - DNA, 65 bp, Mus musculus
tgcttctggtttgtacctcctagtttgcgcactctggaagacaatgaagagagaatgagccgcct

SEQ ID NO: 29864 - DNA, 65 bp, Mus musculus
agaatcttgtttctgggaagacgttcaagtgagacttggaggctgagcatggtgccttggaccca

SEQ ID NO: 29865 - DNA, 65 bp, Mus musculus
cggagcaagagtggaaggcaggatttcatcgctggagcaattacatgatggactggcaaaatcaa

SEQ ID NO: 29866 - DNA, 65 bp, Mus musculus
gccactatgggatgaaggttatgaactggatgaccatactgtgagagactgaactagattgggtg

SEQ ID NO: 29867 - DNA, 65 bp, Mus musculus
accctggtaaaccctgctctattttgggtctggaaggcatggaccacataatgctgcccacatgt

SEQ ID NO: 29868 - DNA, 65 bp, Mus musculus
acaaggaatacaaaaaccttgacaccgggaaattttgttagcctgtcacctcacttcctgcccac

SEQ ID NO: 29869 - DNA, 65 bp, Mus musculus
ccctctaaccttacttatcagggcgtcaagtctggtttccttaccagtacttctgtgattaccgg

SEQ ID NO: 29870 - DNA, 65 bp, Mus musculus
tggtcatttgcccactctggatagccctacagggtagatcttagtggctctagtaggccagtaga

SEQ ID NO: 29871 - DNA, 65 bp, Mus musculus
tacctgctgcagggctgctggtcagatgtgggtgaacacctgcttaggcttggctgtggtaataa

SEQ ID NO: 29872 - DNA, 65 bp, Mus musculus
tcatctagagcaggcatgagtagacagccaggcagagagcagtctgagaacggcacgtagttcct

SEQ ID NO: 29873 - DNA, 65 bp, Mus musculus
gctctatgttggttacacgaacctctaccgggatagtcgcaaactgcccatgatcgactttattg

SEQ ID NO: 29874 - DNA, 65 bp, Mus musculus
ttgtgaatgggtccttgacaggcagctgactaggagggcatcatctgacgagggtgattcttttc

SEQ ID NO: 29875 - DNA, 65 bp, Mus musculus
gagaatggtctgaagtgcattgaggaggccattgacaaactgagcaagaggcaccagtaccacat

SEQ ID NO: 29876 - DNA, 65 bp, Mus musculus
cttctcccagataagcaatgccactgaccgaaagtacctggtcattggcgacctgctcttctcag

SEQ ID NO: 29877 - DNA, 65 bp, Mus musculus
gactacgtggaacgtgggcaagagcacgtcaagatagccctagagaatcagaagaaggcgaggaa

SEQ ID NO: 29878 - DNA, 65 bp, Mus musculus
aacaaatctcagtccctgactaacagcctcagcacatcagatacctcccatcgagggaccccaag

SEQ ID NO: 29879 - DNA, 65 bp, Mus musculus
ttaaagggcatggctgtcttactcctctcacttgtcttttgagcagccaggagcagtctgtctgg

SEQ ID NO: 29880 - DNA, 65 bp, Mus musculus
ctgaagcccgatattcaggatcttcttcaagactttctacttagaacctgccgtgttatcgagct

SEQ ID NO: 29881 - DNA, 65 bp, Mus musculus
gtctccctgcccgtctcgttgcattctccagagaggggacggacctccacttcctctttcagaaa

SEQ ID NO: 29882 - DNA, 65 bp, Mus musculus
tcgatgtgtacttcccgcagatcagcagtgtcaaggaccgcaagaaggccgtgctctctgacatc

SEQ ID NO: 29883 - DNA, 65 bp, Mus musculus
catctttgcctctgggatcatcatggactccagcatctcgaagcaggccctcagtgagatcgaga

SEQ ID NO: 29884 - DNA, 65 bp, Mus musculus
taaaccacagcgtggccaaggaaacagctcgcaggagagctatgctggattcaggagtttaccct

SEQ ID NO: 29885 - DNA, 65 bp, Mus musculus
taattgtacccttaggtggggattatggcccttgttcccagtcccatgtccctggctccacatgg

SEQ ID NO: 29886 - DNA, 65 bp, Mus musculus
tggatttccagtgaatcaggggtgtgtgggtgactgagtcagcactccagatacatctctctgct

SEQ ID NO: 29887 - DNA, 65 bp, Mus musculus
taagctcactgcacaaaacaggcccaggaagttctagccactgtatcctgcatgtagaccctggg

SEQ ID NO: 29888 - DNA, 65 bp, Mus musculus
ccctccccacacatcgggagcaatacccccgaccctttcacctttcctgctccaagctcactccc

SEQ ID NO: 29889 - DNA, 65 bp, Mus musculus
aggaagatgaggttcggtcatctgcagaccttcggatacgaaagtcccagcactccgtcctctcc

SEQ ID NO: 29890 - DNA, 65 bp, Mus musculus
ccttctcctggagagctggctttaacctctgaagtgaaaagtggaagtcatgattttccttgagc

SEQ ID NO: 29891 - DNA, 65 bp, Mus musculus
ctctgcagtccctgacagacccttcatcccagggtttctagtcctgtttcactcccaagtagctt

SEQ ID NO: 29892 - DNA, 65 bp, Mus musculus
tttctggacttgttggacctgctggaccattcgctctgtcttcctgtctgtgagctaccacccta

SEQ ID NO: 29893 - DNA, 65 bp, Mus musculus
actgatggttaccagaacagaacagagtctcctcagctccgctgtgtcctcaacagcaaccacat

SEQ ID NO: 29894 - DNA, 65 bp, Mus musculus
aaacactgcaacggagaacacagccacggagaaacgaagaagcacccaccgggggaacgaacaca

SEQ ID NO: 29895 - DNA, 65 bp, Mus musculus
ccgtgttgtgttagccagatacactcgccagtactcaccaagtccacaggtttaaaggtcagact

SEQ ID NO: 29896 - DNA, 65 bp, Mus musculus
cgagaggaagagtcctcacaggtggaagaaatctcacaaacagacaacgaagagtcatgagaggc

SEQ ID NO: 29897 - DNA, 65 bp, Mus musculus
acaacactcccatcaccatgctctgccctcccaggaagtgaacgcacccatggtctatggggtct

SEQ ID NO: 29898 - DNA, 65 bp, Mus musculus
ccaggagtgtctcacttacgatggagaaatggactataagacctacctggactttgttcttgcct

SEQ ID NO: 29899 - DNA, 65 bp, Mus musculus
cagcgtggtacaccgactctgcagcgattcttgcttctccaaattccgagccaacaagggactga

SEQ ID NO: 29900 - DNA, 65 bp, Mus musculus
tctgtgcagagggagcagcagatggggaagtgactaagactggggaaacagagtggattgtttga

SEQ ID NO: 29901 - DNA, 65 bp, Mus musculus
aaagacaggccagaagagacctggacaacagcaggcaacttagcaaatggatccggaagtcagtg

SEQ ID NO: 29902 - DNA, 65 bp, Mus musculus
ctcctcagaggattatattcatcgaattggaagaactgctcgcagtaccaaaacaggcacagcat

SEQ ID NO: 29903 - DNA, 65 bp, Mus musculus
ccatagaagaggcccttcacgtcggtatcattgatgtcctcatcgccaccagactcaaagatcaa

SEQ ID NO: 29904 - DNA, 65 bp, Mus musculus
atcagtcacttgcctgacccggtaccatgagttgcctcatcagcctcgttcttggcctgctggcc

SEQ ID NO: 29905 - DNA, 65 bp, Mus musculus
aggcaggcgacaagcattatcatcccagctgcgcacgatgcagcagatgcaatcagatgttcaca

SEQ ID NO: 29906 - DNA, 65 bp, Mus musculus
cagggaactctgtaacacaaacagcccataccctgtcacatattagaccggttgcagttcggagc

SEQ ID NO: 29907 - DNA, 65 bp, Mus musculus
tccgcggtcactgccgccgcccccagcgacgtcacccacgcgcgcagaagcggacgccgtggtca

SEQ ID NO: 29908 - DNA, 65 bp, Mus musculus
acattacagagggacagaatgttgaggctgagttcaaagacagggtttgtgccaacacatcctgg

SEQ ID NO: 29909 - DNA, 65 bp, Mus musculus
gaatgttcttcggtgtacagcaaaggacgcatgctgaccacggaacagaccaagctcatgatatc

SEQ ID NO: 29910 - DNA, 65 bp, Mus musculus
gtcacggatcaactccatctccttggcagggacacaaaagggctgtcttcaatgctttcatggtt

SEQ ID NO: 29911 - DNA, 65 bp, Mus musculus
ttccccagtaatcgtgtaagggaccattagtcagctcccttgaggcatagtgctacccagtcaag

SEQ ID NO: 29912 - DNA, 65 bp, Mus musculus
ttgcatccctctgcccgtatgtactgggtcatactctgcgtagctgctcaagtcacagggtcgca

SEQ ID NO: 29913 - DNA, 65 bp, Mus musculus
actggtgcttcagtgctcaacaagtggcagatgaacccatatgatagagggtctgcttttgcaat

SEQ ID NO: 29914 - DNA, 65 bp, Mus musculus
agttggacagtcgctactggaggataacaaacgctaaaggggatgtggaagaagtccagggacct

SEQ ID NO: 29915 - DNA, 65 bp, Mus musculus
catcgctccaattcgcacaaataatctcagcaaataatctcagcaaatgtggcgctccgtacacc

SEQ ID NO: 29916 - DNA, 65 bp, Mus musculus
gaagaattgtcaggtgtcaggagcagatctagcagaaatcgtgcctcatactaacgctgaatttg

SEQ ID NO: 29917 - DNA, 65 bp, Mus musculus
cggggctgagcaaactggacatgacactgctctctgtttgagattggactaaaggctccagaaaa

SEQ ID NO: 29918 - DNA, 65 bp, Mus musculus
gggagggtctgttggctgtccagattacggatcctgaaggcaagcccaagaagacacacattcaa

SEQ ID NO: 29919 - DNA, 65 bp, Mus musculus
gagctagagaagatcttggcccatttagaagatgagaaccggattctccagggagagctgaggcg

SEQ ID NO: 29920 - DNA, 65 bp, Mus musculus
caatgccataatccgggaccaaatcaagcatctgcagaaggcagtggacaggtccttacagctgt

SEQ ID NO: 29921 - DNA, 65 bp, Mus musculus
atgattttcccttgttgctcctgaccctttgcaagcgacccctgcagccattgcattcatgcgct

SEQ ID NO: 29922 - DNA, 65 bp, Mus musculus
ataagcacaacgcctgtgccaatgcagcaaaggaaaaggcaggcaggtatcgacaccgcaaacta

SEQ ID NO: 29923 - DNA, 65 bp, Mus musculus
taaggacaaatcttcgtgcaaactggactcctcctcatagcactttgcgctgttgtacttttctg

SEQ ID NO: 29924 - DNA, 65 bp, Mus musculus
tcctctgtatcacacaagacgtctcgcttgctgtgtcgtggtttagctcctcggtggtgaggcgt

SEQ ID NO: 29925 - DNA, 65 bp, Mus musculus
aagtacgagacactgcagatggcgctcagctacatcatcgcgctcacccgcatcctagccgaagc

SEQ ID NO: 29926 - DNA, 65 bp, Mus musculus
gaatatctggatcagttgcctgatttcccatacaaagatgacctcctggcattggactccagctg

SEQ ID NO: 29927 - DNA, 65 bp, Mus musculus
gatgcattggttttcttacctccaaatggttctgagaatgactgacagaaagcaagagcatgcat

SEQ ID NO: 29928 - DNA, 65 bp, Mus musculus
tcctggatctcatcaagaaaggcgtggcaaaggttgaccatgtccagatgatagtgctagatgag

SEQ ID NO: 29929 - DNA, 65 bp, Mus musculus
aagataatcacacttgccaagtccccgtgttgtgcaagtccagcgccattgaagtgagtgtcccc

SEQ ID NO: 29930 - DNA, 65 bp, Mus musculus
aggaattactgctaatccccatccatctggaggtgcactggtcccttatctcagttgatgtaagg

SEQ ID NO: 29931 - DNA, 65 bp, Mus musculus
agcctttctttccaaggtgaggatggtgcttgtgtgcatcagaattgccgagatgtcacagctgg

SEQ ID NO: 29932 - DNA, 65 bp, Mus musculus
aagatggggtcaaacctgaccgccagtgaggaggaatttctgcgcacctatgctggggtcgtcag

SEQ ID NO: 29933 - DNA, 65 bp, Mus musculus
tgagacacagccccagaagtaggacagtcctcatcaagtgccccagtcccatggtgacagtgaca

SEQ ID NO: 29934 - DNA, 65 bp, Mus musculus
ttggagaaagtggatgtagaacagaagatgagcatccgatttcttcactaaagggcagagaccaa

SEQ ID NO: 29935 - DNA, 65 bp, Mus musculus
tatacgctgtgctgtgggttcttagccgattggaggggacaacggactcctgtgccccagagata

SEQ ID NO: 29936 - DNA, 65 bp, Mus musculus
ccaagtctatacagcaagacccttcactcgtggatccagagagaacataatgctttcaatatgct

SEQ ID NO: 29937 - DNA, 65 bp, Mus musculus
aagacatgcccaatctcttggccgatgagcatgcgctgatagcctcctatgtggctcgtctgcaa

SEQ ID NO: 29938 - DNA, 65 bp, Mus musculus
catgagcgatgaggagctccgggccatgatagaggagtttgacaaagacggcgatggagagataa

SEQ ID NO: 29939 - DNA, 65 bp, Mus musculus
ttatctccctcgtgtgttgaacttgctgtccgtccatgcaccctacgaaggccatgctgtgcaaa

SEQ ID NO: 29940 - DNA, 65 bp, Mus musculus
tctgagcatcccggttgtctcatgaaggtttcgctacctgatggaactcaaatgtcttcgccaac

SEQ ID NO: 29941 - DNA, 65 bp, Mus musculus
gctgtatgcctacgactggataagtatcccattggtgtacacacaggtggtgacagtggcagtat

SEQ ID NO: 29942 - DNA, 65 bp, Mus musculus
ctggtgatagcagttgggctggtgagagcatacctggctaaggggagctaccatagcctttatta

SEQ ID NO: 29943 - DNA, 65 bp, Mus musculus
cagcaagcccacaaggttctcaagagacctgcccagaaaatggcatctacagctctgctctattt

SEQ ID NO: 29944 - DNA, 65 bp, Mus musculus
atgggcgagtacactgtgaatgagggtgccatcttccatggatgggtgctgcagaaaatctcaca

SEQ ID NO: 29945 - DNA, 65 bp, Mus musculus
tacagccagccataccctactctggactctgtaggctcacggttgtccacagtggccatgatccc

SEQ ID NO: 29946 - DNA, 65 bp, Mus musculus
tctgtgactggaaggaataaaagttgacaatgtagcaggcaatgtcctcagaacaaccagtgcga

SEQ ID NO: 29947 - DNA, 65 bp, Mus musculus
tccagggagcagaagacggaataaagagactgggcgtctgaaatgggcagcctccatccacccac

SEQ ID NO: 29948 - DNA, 65 bp, Mus musculus
ataaacactcaaggaaagggttcccacttcctggagccatgccacaagggagcagaaaagcctcc

SEQ ID NO: 29949 - DNA, 65 bp, Mus musculus
ttgtggaggatggcgtccaccttcaggaagtcaaacgttgcctctaccagctacaagagaaaggt

SEQ ID NO: 29950 - DNA, 65 bp, Mus musculus
tgacgtccatcatccagctcatgtcctgtctgtgtgtcatgatcggagcttccatctatacagac

SEQ ID NO: 29951 - DNA, 65 bp, Mus musculus
gtctgattgctgtgttacaaggacccagctgagctgatgtcattcgcactgcctctgttgcttct

SEQ ID NO: 29952 - DNA, 65 bp, Mus musculus
cacccctgctttgctccgtgcattttgacagtgtatgaattgcgtttaagtggatgaggggccct

SEQ ID NO: 29953 - DNA, 65 bp, Mus musculus
tggttctagggaaaccagcagcaagtgattcaggcaatggtgacacttaccaaagcagaagtgga

SEQ ID NO: 29954 - DNA, 65 bp, Mus musculus
aagaatgtggacaggagcaccgcacagcagttggcagtaactgtgggcaacgtcaccgtcattat

SEQ ID NO: 29955 - DNA, 65 bp, Mus musculus
catagctttccaaggatgtatgtggtcctgcctcaacatatcagagcctgacagatggaagcacc

SEQ ID NO: 29956 - DNA, 65 bp, Mus musculus; identical to SEQ ID NO: 23716

SEQ ID NO: 29957 - DNA, 65 bp, Mus musculus
aaagtcacacacttatccagcaagctgagtctgctaggatggcatcttctggacctgggtgctca

SEQ ID NO: 29958 - DNA, 65 bp, Mus musculus
aggtggagtcctctgctgaccctgtctggaagatttggctctagctgaggaaggagtcttttagt

SEQ ID NO: 29959 - DNA, 65 bp, Mus musculus
tctctatgtagtaccaagtaggcagaagctcacccatgttcttatcgcagccattattggagcag

SEQ ID NO: 29960 - DNA, 65 bp, Mus musculus
cactggcacttgaatgttgaatgtcaccgtatgcgtgaaattatatatttcggggtagtgtgagc

SEQ ID NO: 29961 - DNA, 65 bp, Mus musculus
aaggcgttctacgacaaagacggctcacggtggagtaaagacaaggatgcctacagcagcttcgg

SEQ ID NO: 29962 - DNA, 65 bp, Mus musculus
aattactccaccatctggtgcaatgaccacttcatccacgccaaggccatgcggaaggttcggga

SEQ ID NO: 29963 - DNA, 65 bp, Mus musculus
ggtgaaagctctggggaattctgaggaagcaacaatgcttcagcatcgactggatgacatgaacc

SEQ ID NO: 29964 - DNA, 65 bp, Mus musculus
aagatactgtgagacctgaggacccaccagtcagaacccacatggcaagtcttagtagcctaggt

SEQ ID NO: 29965 - DNA, 65 bp, Mus musculus
gcaggctgagaatatggagagactatgtgcctcccactgctaatttggaccaaaaggacaagcag

SEQ ID NO: 29966 - DNA, 65 bp, Mus musculus
ggacctgtcgatagacattggtagacacagcgcttctgtaggacacacatacccagcaatatcag

SEQ ID NO: 29967 - DNA, 65 bp, Mus musculus
cacagatgtgccacacccctctgcacactcacagaatcagacactaaaacacctgccttaggtgt

SEQ ID NO: 29968 - DNA, 65 bp, Mus musculus
tagcctgcagctaggcatggcagttgtcctggaaggggtaggacttccggttttgtccgctccag

SEQ ID NO: 29969 - DNA, 65 bp, Mus musculus
ctgggtcacgactttatcactctcagccatcttttgctgttgaagtgctgacagttcggctgtga

SEQ ID NO: 29970 - DNA, 65 bp, Mus musculus
ctggacacgctcaccgtgatgggcattgcgtttgcagcatttgtgatcggagcactcctgacggg

SEQ ID NO: 29971 - DNA, 65 bp, Mus musculus
agattcaggttctcccctatgggtgtagatcacatgagtgggatttctggtgtcaatgtccccgg

SEQ ID NO: 29972 - DNA, 65 bp, Mus musculus
gcataccgcagtaggattcaatgctggtaaggaaatgaaacaccattttcaacgtctaggctgcc

SEQ ID NO: 29973 - DNA, 65 bp, Mus musculus
gaggggtgacagacaagacaaactgcgagaggagtactgtgagaggctcctggtcccgtataaat

SEQ ID NO: 29974 - DNA, 65 bp, Mus musculus
tttcttgtcatgatggttcggtgcatgaaggacgacagcaaagggaagtctgaggaggagctgtc

SEQ ID NO: 29975 - DNA, 65 bp, Mus musculus
gtgacagcttgtgtctgctgttcacatctccagctcacaacttgtcaagggttggaaaggtatct

SEQ ID NO: 29976 - DNA, 65 bp, Mus musculus
tcctgtgtgtgcaagaagaatgtctgccctgctatggtagctcctgtgtgtggctcagatgcttc

SEQ ID NO: 29977 - DNA, 65 bp, Mus musculus
catttgatgaccagcttgccaagagtcctgtcccctactgatgtgttcttatagctgcctacatg

SEQ ID NO: 29978 - DNA, 65 bp, Mus musculus
agatgagcaataccctcacagcccctatcgtgatctggaagtataagtcgttctgtcgggaccgt

SEQ ID NO: 29979 - DNA, 65 bp, Mus musculus
gaatacaaacgactcaactttcacctctacatggcgctcaagaaggccctgttcaagcctggagc

SEQ ID NO: 29980 - DNA, 65 bp, Mus musculus
atgctcagatataccaacggtcctcctccactctgaagcaagcagacatccccacacaagtgcag

SEQ ID NO: 29981 - DNA, 65 bp, Mus musculus
tggagagcatcaaggagacatatgagaacacaagcaaccaggtgcatactcttcggaggctcatt

SEQ ID NO: 29982 - DNA, 65 bp, Mus musculus
tcaatgtggtgactgttgtctgtaaaggcttccctccttgcctttcactccaccatccacctgcg

SEQ ID NO: 29983 - DNA, 65 bp, Mus musculus
atcatcattggcatacaaaagatgggtatagtggagtcttcagccagccagatggaatgtgactc

SEQ ID NO: 29984 - DNA, 65 bp, Mus musculus
cagaacccaaggtcccagatagacagccactgatctagggatacacatgagctctctgggtcata

SEQ ID NO: 29985 - DNA, 65 bp, Mus musculus
tctctaaggctacaggctgctcagctgcctgacaagggacacttcgggccatgtttctcttgcaa

SEQ ID NO: 29986 - DNA, 65 bp, Mus musculus
gtctgggtggcacaaagtacatctctttcgaggaacgccaatggcacaacgactgctttaactgt

SEQ ID NO: 29987 - DNA, 65 bp, Mus musculus
tggacaaggctgatggtatgatccggctgttgttcaatgatgtgcagacccttaaagatgggcgg

SEQ ID NO: 29988 - DNA, 65 bp, Mus musculus
tcagacgcgtgattgcagcccatggcttttcttccaaggagatcatcacattctggcaggtgatg

SEQ ID NO: 29989 - DNA, 65 bp, Mus musculus
tagtccattgtctgatcggaattgtacccacttctgtgcttgtgactggggtccaagtgagctca

SEQ ID NO: 29990 - DNA, 65 bp, Mus musculus
actagcagcagctcggagtgcatgtggtgcagtaacatgaagcagtgtgtggactccaatgccta

SEQ ID NO: 29991 - DNA, 65 bp, Mus musculus
ggatattgcacaataccaagacatcgatggccaacatttgtagaatccgtaacttaacttactaa

SEQ ID NO: 29992 - DNA, 65 bp, Mus musculus
ttactgtgcaccagggcaagatctacgtcctcggaggctatgatggccacacttttctggacagt

SEQ ID NO: 29993 - DNA, 65 bp, Mus musculus
ttggagtacccctctatgaatcccctcctggtagcagatacgtgtccccgaagaagggaatcaat

SEQ ID NO: 29994 - DNA, 65 bp, Mus musculus
ctgcaacgctactctacacagatccacagcttcagagaggggagctagcacgcgcttcgggctcc

SEQ ID NO: 29995 - DNA, 65 bp, Mus musculus
ggctaccgtaatgtttggcaagtgggttcgttgaataaatgcatctgaacataccttgttcttcc

SEQ ID NO: 29996 - DNA, 65 bp, Mus musculus
cagcagtctggacactcaaacttcacactcaccaacaggaatctgatacgtgtctacgcgaagca

SEQ ID NO: 29997 - DNA, 65 bp, Mus musculus
cccctgaaagcagaacataagtggtctacattgcactgaaggactcttgcctttctacggaaccc

SEQ ID NO: 29998 - DNA, 65 bp, Mus musculus
ctatatttcctgattgactgcctcctcccagacccatgcttctacatttactgagggtataaatg

SEQ ID NO: 29999 - DNA, 65 bp, Mus musculus
cttcctcccaccacatcaatgttgtcaccatgggtccctcctcagtcatcaactctgtctctaca

SEQ ID NO: 30000 - DNA, 65 bp, Mus musculus
gtacctggaactgggaaacaaaccggcacccaacaccttctacgtgggcatctacattctcattg

SEQ ID NO: 30001 - DNA, 65 bp, Mus musculus
tcagaggtgcactcaagccatgaaacttcatgctggagaacagtgatgccccagaggctatgaca

SEQ ID NO: 30002 - DNA, 65 bp, Mus musculus
gggcctctgaatttcctggcattgtgagatgcacttaggagccatcctatgaggtcacatgacat

SEQ ID NO: 30003 - DNA, 65 bp, Mus musculus
tctccaggttaggctggggtgatactctgggatgctctgtatacaaagatgatttgaatgggctg

SEQ ID NO: 30004 - DNA, 65 bp, Mus musculus
catgttggagaagagttgcaagaagttcatgttgttccgggaagcaaacgagttacagcagtgga

SEQ ID NO: 30005 - DNA, 65 bp, Mus musculus
agtttaccaccctggacagggaccatgatgtctacacaggaaactgtgcccactatcagaaggga

SEQ ID NO: 30006 - DNA, 65 bp, Mus musculus
tttgagtatgcctagagatgctgttggtgtctgtctccttggtgacaggctatatgctgttgggg

SEQ ID NO: 30007 - DNA, 65 bp, Mus musculus
attgtcaacctgtactgactctgtgtatggctctgtccttggcttgcactggcacaaaccaagcc

SEQ ID NO: 30008 - DNA, 65 bp, Mus musculus
ctgggatcggtgaatgtgtgcggctttgaacctgatcaagtcaaagtgcgcgtgaaagatgggaa

SEQ ID NO: 30009 - DNA, 65 bp, Mus musculus
agggtcctcactgagcatcaaacggacctatgatgaacacatcccctatacccacatgaatgggg

SEQ ID NO: 30010 - DNA, 65 bp, Mus musculus
ggggttgttcctgtccatatgtttgtgccggtacattcattctgaagactacagcaaggtcccca

SEQ ID NO: 30011 - DNA, 65 bp, Mus musculus
ctctagacctggaggttcctctttctaggggtcacctgtcagggcttatgactgtgaatctttga

SEQ ID NO: 30012 - DNA, 65 bp, Mus musculus
gtcctcagtaggcagtggacccattgagaggcaaatgagaacaggagggagacaagctgtgttct

SEQ ID NO: 30013 - DNA, 65 bp, Mus musculus
tgtctgaggcagtagcccttctgtaccagtcatgagctgagctgcatttgcttgaccaaatctct

SEQ ID NO: 30014 - DNA, 65 bp, Mus musculus
acctgagaaaggccacctgcttgctgggcagatccattggattagcctatgagggaaagtgtatc

SEQ ID NO: 30015 - DNA, 65 bp, Mus musculus
ccccaaagtggaaaccatgacgttgaagacacaaagcattacacctgctcagactgagtcacctg

SEQ ID NO: 30016 - DNA, 65 bp, Mus musculus
tcaaccccatcgtttatgctctggtctccaagcatttccgcaaaggtttccgcaaaatctgcgcg

SEQ ID NO: 30017 - DNA, 65 bp, Mus musculus
aggactgagcctggccattccctccctcagcctccattctcatcccaatgaccctgttttctcag

SEQ ID NO: 30018 - DNA, 65 bp, Mus musculus
gggtcctttacacgctgttcaccaagtacaaggatgtggagtgatggagcaactgatcctccagg

SEQ ID NO: 30019 - DNA, 65 bp, Mus musculus
aggactgctgtttgggctttctgaaaatgatggcaaggctgccgtgtccacaaattgcagagctg

SEQ ID NO: 30020 - DNA, 65 bp, Mus musculus
caccgcaaaccttgtgaaggaagactctgatgtatagccttgccaactctctagggaacatttag

SEQ ID NO: 30021 - DNA, 65 bp, Mus musculus
tcgtggggactcctggccgaattctagccctggctcgaaataagagcctgaacctcaaacacatt

SEQ ID NO: 30022 - DNA, 65 bp, Mus musculus
ttgtaaggtttgtgaatgtgctggagccctgtgatgtttggagcactttcagaactccgactggc

SEQ ID NO: 30023 - DNA, 65 bp, Mus musculus
atatcagcgtcgaggaacttggagatgtaatgaagcagctgggcaagaacctcccagagaaggac

SEQ ID NO: 30024 - DNA, 65 bp, Mus musculus
ttgaagcagagcgtggcaaaggcaaaactggagagattgcagtggatggagtcttgctggtgtca

SEQ ID NO: 30025 - DNA, 65 bp, Mus musculus
gagtttgcatatctctacagccaatgctacgagctcaccaccaatgagtacgtctaccggctttg

SEQ ID NO: 30026 - DNA, 65 bp, Mus musculus
ctgtggctcctgtgggggctgcaagggaggctgttgtcaatccagttgctgtaaaccctgctgct

SEQ ID NO: 30027 - DNA, 65 bp, Mus musculus
ttacatggctagtccatcctatacccctgcaatggagattctgcttcttaccctcccttccaagc

SEQ ID NO: 30028 - DNA, 65 bp, Mus musculus
cgggaatgtgccttcagaaactgggccttgttccagagaagcacaaaggcttcaggacatttgat

SEQ ID NO: 30029 - DNA, 65 bp, Mus musculus
cattccactgaggtattacttattccttgccaagtgtccttgaattcctttcttgccatattgca

SEQ ID NO: 30030 - DNA, 65 bp, Mus musculus
ggatccggtgggggctatagaggatctggaggattccagcgaaggggttatggaggtggttattt

SEQ ID NO: 30031 - DNA, 65 bp, Mus musculus
cattttgacataccaccacctttgggtatatcacaccactagttttgtgctcataatagaagtgg

SEQ ID NO: 30032 - DNA, 65 bp, Mus musculus
agagatagtaggtactaggatttaggggcacttctgagccccatttccctggcaggttcaccgga

SEQ ID NO: 30033 - DNA, 65 bp, Mus musculus
atatagagaccttaaatcggccatatttgctgtaggggctatagtcagagatcacatcttgtctt

SEQ ID NO: 30034 - DNA, 65 bp, Mus musculus
cctgatctctcaacaaggactgagtggaaggtgaggtcctgactccttcagcaaggctcctgaag

SEQ ID NO: 30035 - DNA, 65 bp, Mus musculus
ctgtagataggaggtgcttctggtgaactgaaagtgtctgactcgtgaggaacatggtaggttcc

SEQ ID NO: 30036 - DNA, 65 bp, Mus musculus
aggaatgtaacatttacctctgctggggactcatcccgaaacccaagtgcctatggggttattgc

SEQ ID NO: 30037 - DNA, 65 bp, Mus musculus
gttctgcaaatgctggatttaatagtaaccgtgccaatagcagccgaagtagtggtagtagccac

SEQ ID NO: 30038 - DNA, 65 bp, Mus musculus
tgcaatcctgctgacctccattgcctatgagaagttcagaactagcactgtggatcaggagcatc

SEQ ID NO: 30039 - DNA, 65 bp, Mus musculus
cgtgggactgtgtcttcgaaagcttggcatccatcctttccagaatagtggcttcaatcactgga

SEQ ID NO: 30040 - DNA, 65 bp, Mus musculus
tgccaagatgcttgcggttccaagtgcgtgaatcctgttcccattcgcaaaccagtgtggaggaa

SEQ ID NO: 30041 - DNA, 65 bp, Mus musculus
cacaatatcctgttcagcacggactatgagacgcacgagtttcatctgccaagtggggtgaaaag

SEQ ID NO: 30042 - DNA, 65 bp, Mus musculus
ctgggtgtccaacctgcgctacaaccacatgcttcgcaagaagaagaacctcctgttgcagtata

SEQ ID NO: 30043 - DNA, 65 bp, Mus musculus
tgatggacaagaatgctgatgggaagctgactcttcaggagttccaggaaggctccaaggctgat

SEQ ID NO: 30044 - DNA, 65 bp, Mus musculus
tgtaacttcacaggtgtggggagagactgccttgtttcaacagtttgtctccactggtttctaat

SEQ ID NO: 30045 - DNA, 65 bp, Mus musculus
ggggtaccactgaatctgtacagagccgtacaaaccgaagttctgcctctgatgtactttgtgaa

SEQ ID NO: 30046 - DNA, 65 bp, Mus musculus
tactaggcggcctgattttctgcttcggcacctggatcctcattgacaagaccagcttcgtgtcc

SEQ ID NO: 30047 - DNA, 65 bp, Mus musculus
cgggttgggtggagatggagatgatatggaaatgttcatggaggagatgagagagatccggagaa

SEQ ID NO: 30048 - DNA, 65 bp, Mus musculus
acgaaaccctcagaggattctctttcaggacagaagggtgactctgtcagcaagcttcccaaggg

SEQ ID NO: 30049 - DNA, 65 bp, Mus musculus
cagaatgtgtgaaaactgcattgagctaaacataggcaccatatccggctttatcttcgctgagg

SEQ ID NO: 30050 - DNA, 65 bp, Mus musculus
aaccaaccagcctcaagggctccacatctctgcctgttcactcagcttccagagctaggaaagag

SEQ ID NO: 30051 - DNA, 65 bp, Mus musculus
gcaggctccaaccctaagaaggttgaccttatcatctgggagatcgaggtgccaaagcacttagt

SEQ ID NO: 30052 - DNA, 65 bp, Mus musculus; identical to SEQ ID NO: 23716

SEQ ID NO: 30053 - DNA, 65 bp, Mus musculus
tagcttctacagccatttggtgtgcacccagaccccttgagactgattgtgtaaccctttacaat

SEQ ID NO: 30054 - DNA, 65 bp, Mus musculus
agaaacacagaagcagggagcagagacagaagccaggagacaagacagaaacagagacgagccac

SEQ ID NO: 30055 - DNA, 65 bp, Mus musculus
ccctggtttctctgggacttttctttgtgtgagtgtgagtgtgtttccttgtgtgtctgcccctg

SEQ ID NO: 30056 - DNA, 65 bp, Mus musculus
aagtgaaagtttgcctcggtgctctcggtgtcgctgcggctctctgcatcccaggacagcggcgt

SEQ ID NO: 30057 - DNA, 65 bp, Mus musculus
acaaaaatttgtgattcggctagagtagaaaatccttgtgttgtgcttggcagttgagttagcaa

SEQ ID NO: 30058 - DNA, 65 bp, Mus musculus
tgatcctttgaggctgagccataggatggactttctggacgtgaggatagagtctttgtgcccag

SEQ ID NO: 30059 - DNA, 65 bp, Mus musculus
taaagagcggctcatgaagctcttgccctgctcagctgccaaaacgtcgtctcctgctattcaaa

SEQ ID NO: 30060 - DNA, 65 bp, Mus musculus
cccgtgaagcacattaaactcctggcaaattgcagtcctctgaggggatacattgctacagcatg

SEQ ID NO: 30061 - DNA, 65 bp, Mus musculus
gcctccagaggagaccactttcatgttgtgcttgcctttccataccctttcctcgggttgtttta

SEQ ID NO: 30062 - DNA, 65 bp, Mus musculus
gtttcaggagtcactgagaacagaagctcagacctgtaacttgctggttaagacacaagtcagtg

SEQ ID NO: 30063 - DNA, 65 bp, Mus musculus
ccatctatgtagtgctgtgttgtggaatgttgagctctgttgccatacttgaagacatggaggat

SEQ ID NO: 30064 - DNA, 65 bp, Mus musculus
gccttgctcacttgctctgtgactgcttatcccaatggcaaagtaccaatgtcctgtggtgggat

SEQ ID NO: 30065 - DNA, 65 bp, Mus musculus
tgaagtgtacgtgccaacctgctggctgctcaactcttgccacccaactcccggcctgagtggca

SEQ ID NO: 30066 - DNA, 65 bp, Mus musculus
agataccatcagaagggagccagctgtggccctgatctccgaggctggcaaaaactgtgcgccta

SEQ ID NO: 30067 - DNA, 65 bp, Mus musculus
tgcagaagaaatccagtgcaatgggaggagtttccacaagacctgtttccactgcatggcctgca

SEQ ID NO: 30068 - DNA, 65 bp, Mus musculus
cacagtaggaggtaactttctcaacagcacatcagtgtacccaacagctgagtattggggctacg

SEQ ID NO: 30069 - DNA, 65 bp, Mus musculus
ctatctctatgatcccagctatggtagcacagtagatctgttggacagtaagactttctgccggg

SEQ ID NO: 30070 - DNA, 65 bp, Mus musculus
taagtgtatgggcaactggtgtcatttaggttggaatcccttcgatggtatagagagggcgatgg

SEQ ID NO: 30071 - DNA, 65 bp, Mus musculus
aaagaccagcctctattaagatcagtgtttctttttctactgcaagcacatgtgactagatttag

SEQ ID NO: 30072 - DNA, 65 bp, Mus musculus
agccggccattcgcgaggttcattgaggataacaaggagattgggatcaattagcaggatacact

SEQ ID NO: 30073 - DNA, 65 bp, Mus musculus
gagtacatcacttcagaagaagtcgggcagtgcttaaatctgatcatctctgctaactcatctca

SEQ ID NO: 30074 - DNA, 65 bp, Mus musculus
tccaacttcaacaactatgtagctgccatctacaaggtgctgggaacctttctgttcggggctgc

SEQ ID NO: 30075 - DNA, 65 bp, Mus musculus
aaagcagaggaaaccattgtcaacaagcgggaagaagcaggcagccaaatcgaaagaggagctag

SEQ ID NO: 30076 - DNA, 65 bp, Mus musculus
aggaaagcaggtggtccagtgtctgtgagtcactccgtagctcgagtgttacttgctaagttatg

SEQ ID NO: 30077 - DNA, 65 bp, Mus musculus
ttgtcatggtgatccctgtgagaaacttcagcttatgagtgcaggcagcagcagtgggactggct

SEQ ID NO: 30078 - DNA, 65 bp, Mus musculus
aatgcaatgaggtcctttcctggctggaggccaaccagctggctgagaaagatgagtttgatcat

SEQ ID NO: 30079 - DNA, 65 bp, Mus musculus
gctcaccccagtttgtagacaagctgaaacaaatcacgaagtccctggtggaggatttcaactcc

SEQ ID NO: 30080 - DNA, 65 bp, Mus musculus
gcctttggacatagctcatctcttacctaccatatgagaactcatacaggtgactgcccctttga

SEQ ID NO: 30081 - DNA, 65 bp, Mus musculus
tgcccatgctgcctgaacttcctgaagtgcccatggagatgcccccaaggcctgaactctcttca

SEQ ID NO: 30082 - DNA, 65 bp, Mus musculus
aagatgagaagggaactgtcatcctggactggaagtagtgcatccaacagactcaaggccaggca

SEQ ID NO: 30083 - DNA, 65 bp, Mus musculus
ccagggtgtagaagctcctacaagctctgggttcctaggtctatctacctttctagaggtataag

SEQ ID NO: 30084 - DNA, 65 bp, Mus musculus
aaaggaatctcagcggagtgggaatgtagccgaactggcactgaaagctactctggtggagagct

SEQ ID NO: 30085 - DNA, 65 bp, Mus musculus
aaacggtttcaagtgaaatggagagcccaagtcgtctcaaatccagaatggaatcaccgcgttgg

SEQ ID NO: 30086 - DNA, 65 bp, Mus musculus
ttggacttcaagcgtaaagcacgaagtgggagtagcagctacagctatggcccaatggtgtcaca

SEQ ID NO: 30087 - DNA, 65 bp, Mus musculus
atcacagactctctcaagcaagctgtgggccatgaagccatcaagctgctggtgaacgtggatga

SEQ ID NO: 30088 - DNA, 65 bp, Mus musculus
ctggggttacaggtttgcgctgacatgcctggctagttggaactctttgttcttaaaagcacagt

SEQ ID NO: 30089 - DNA, 65 bp, Mus musculus
tcaggcttccaaccttggccttcgggataccctgtaaggacagtgcacttgctggacaatgccag

SEQ ID NO: 30090 - DNA, 65 bp, Mus musculus
aggagcgagatggccacgtgaagaccatcagcaacctgaagcaggaggtaaaggacacagtagac

SEQ ID NO: 30091 - DNA, 65 bp, Mus musculus
aacccctcaagaatctcaacaactgtttgcagcagctcaagcaggaaatggacagtctccagcgc

SEQ ID NO: 30092 - DNA, 65 bp, Mus musculus
tcttcaaaagtcgctctgagcgcaaatcctgtccatacttctctccaccagcgtggtcgctgtaa

SEQ ID NO: 30093 - DNA, 65 bp, Mus musculus
ggctctcatatgtgtaacagcatcttagccatcttaaccatcagacctacagacgaggggaagcc

SEQ ID NO: 30094 - DNA, 65 bp, Mus musculus
cctgaactggcctcttcaacacaccattaggtgggtgaatcctttgaattctctgcttcccttcg

SEQ ID NO: 30095 - DNA, 65 bp, Mus musculus
gaagactttgacttctgatagccatggactcactagactgctgaggaagacccagcatctattca

SEQ ID NO: 30096 - DNA, 65 bp, Mus musculus
tatccccatggacccagaacatgtagagctggtgaaaaggacgatggctggagtaagcctgcctg

SEQ ID NO: 30097 - DNA, 65 bp, Mus musculus
tggctaagtcaacactggtcctggtgctggtatttggcgtgcattacatcgtgtttgtctgccag

SEQ ID NO: 30098 - DNA, 65 bp, Mus musculus
tagcttcaacagctactcatatcatggcaacacagaccagaacttcatgacggtcccaggtagct

SEQ ID NO: 30099 - DNA, 65 bp, Mus musculus
ggtggctatcctgtactgctttgtcaacaatgaggtccagatggagtttcggaaatgctgggagc

SEQ ID NO: 30100 - DNA, 65 bp, Mus musculus
aagaggtgaggacagagatttcacgcaaatggtatggccacgaccctgaacttctgccagctcga

SEQ ID NO: 30101 - DNA, 65 bp, Mus musculus
actatgtcgtggtccagtgcaaggactgtaggttctgtacctagtgttctggcacagcctatgta

SEQ ID NO: 30102 - DNA, 65 bp, Mus musculus
gagctctggctgtccttgtgaaggacatggtcttctacaactcttactccaggaggcctgacagt

SEQ ID NO: 30103 - DNA, 65 bp, Mus musculus
gtgcgctcttggtctttccacttattgcctcgttcgtaagaaaccaaccataaggtgccaaggag

SEQ ID NO: 30104 - DNA, 65 bp, Mus musculus
cggaccacctagaggaactgctggagcaacacaaagggtcatctctgagttctaagtgacatcgc

SEQ ID NO: 30105 - DNA, 65 bp, Mus musculus
ggagtttggaaggtgcctgtcgcagattctccacatcgagttcaagtccaaggggctgaaaattg

SEQ ID NO: 30106 - DNA, 65 bp, Mus musculus
aagcagaggagagttcagaggctaccatccaccaaggatgccaagctacacaatcagaagtgtag

SEQ ID NO: 30107 - DNA, 65 bp, Mus musculus
gcctgagtaagaatgaggacagctgggtgatcctgggcttcttcatctttctgcctttcatcgta

SEQ ID NO: 30108 - DNA, 65 bp, Mus musculus
ctagatttcacatggattcttccaagtgtgattcaactagagattgcaacgaccatggggtttgc

SEQ ID NO: 30109 - DNA, 65 bp, Mus musculus
gcaggattcgggactggtgaacttgtgacaatcacactcgggacaaaataaatgaccactcgacc

SEQ ID NO: 30110 - DNA, 65 bp, Mus musculus
cctgctggatcacttgtgctgccaaagaccaatcagattcagtaaatgctgggaaatcctgggtc

SEQ ID NO: 30111 - DNA, 65 bp, Mus musculus
aaggttcaaaatgctgttcattgcacggatctgccggaggatgggctcctggaggtccagtattt

SEQ ID NO: 30112 - DNA, 65 bp, Mus musculus
tcatggtgcagtgtctttagcccatcatggctactcaggccagcacttgagtaccacacaaagat

SEQ ID NO: 30113 - DNA, 65 bp, Mus musculus
ctgtggaccttggatactgagagttgcctttaccaaaatggaaggacggattgaaggaaggatgt

SEQ ID NO: 30114 - DNA, 65 bp, Mus musculus
caagacagaaacctcatctattacccacaacttccactccagaaagaatccctgttcctcggctc

SEQ ID NO: 30115 - DNA, 65 bp, Mus musculus
acgagtcctccatgaagaagctcgtggcctgtgtgagtcaagacaacttttccctgtcatcagag

SEQ ID NO: 30116 - DNA, 65 bp, Mus musculus
gaaaatgcagatgtcccagtggttcgagggaaatctactttgcgtacgagaggtgtaactacacc

SEQ ID NO: 30117 - DNA, 65 bp, Mus musculus
tccaccctgctgctcatcccactctttggaatccactacacagtatttgccttctctccagagaa

SEQ ID NO: 30118 - DNA, 65 bp, Mus musculus
gcagtccattgtctatgaggcaaacagaaggggcttactcaaccaagtgtttctgggacagtgtg

SEQ ID NO: 30119 - DNA, 65 bp, Mus musculus
gtgtgtgcacatgtgtgcaggtgcataaactgttgatctgcttgctgtgtggcaggagagtaagg

SEQ ID NO: 30120 - DNA, 65 bp, Mus musculus
ggtttcatactcaaaggcacggaacttttggccacagtgttctcctggcttaggctcacattacc

SEQ ID NO: 30121 - DNA, 65 bp, Mus musculus
atgcacagttcaagccacatacagatgaggacctggtatacctggagcctagcccggacttctgt

SEQ ID NO: 30122 - DNA, 65 bp, Mus musculus
aggaatctgtactcgggtattaccctatggtctcaattcacccaaccatgccatcattcagagcc

SEQ ID NO: 30123 - DNA, 65 bp, Mus musculus
aactgaggtgctggttgtactagaggtatctgtcggtttgcagaagtaatgaacccttccccacc

SEQ ID NO: 30124 - DNA, 65 bp, Mus musculus
taattgtgagcaccacaggtcccaaccccttcaacacgctgacagaccgtgaactggaagaatac

SEQ ID NO: 30125 - DNA, 65 bp, Mus musculus
tgacttcaatggggaaatggagcaggaagctgaccgaatcaacttgcagaagtgccttggaccca

SEQ ID NO: 30126 - DNA, 65 bp, Mus musculus
ccaggaccaaaatcacgtggatgaaagcagaagactcctctaaagtcagtagtgggacaccgatc

SEQ ID NO: 30127 - DNA, 65 bp, Mus musculus
gagaggatgaaatgcttcagtgaagagaatcatgaacccttgagaactcagtgtgcacttgctgc

SEQ ID NO: 30128 - DNA, 65 bp, Mus musculus
ccatagtgagccattgtacagctaccatcagagcacagtacccgagactaggagttacttcactc

SEQ ID NO: 30129 - DNA, 65 bp, Mus musculus
tgtaatgtctgtcagatccgcttcaattctcagagccaggctgaggcgcactacaagggtaatcg

SEQ ID NO: 30130 - DNA, 65 bp, Mus musculus
aggatggctgttcacgaacccagacctggaggatacaatgagcagagaatagttggtgatttcaa

SEQ ID NO: 30131 - DNA, 65 bp, Mus musculus
gatttacaaccaagccacagttctccgtacctgattgcctttcttgtggatgtctatgaagacat

SEQ ID NO: 30132 - DNA, 65 bp, Mus musculus
ttacatccacacacagaagaacgtgctgattgaagtgaacccccagactcgaattcctagaacct

SEQ ID NO: 30133 - DNA, 65 bp, Mus musculus
aagcaggacctcctgggttgctctactgttggtacagtgctgaggaaccaaaccactcccactgt

SEQ ID NO: 30134 - DNA, 65 bp, Mus musculus
cgaaataaacagtctccttgcatggtttcttgtcccctttgtaactgcttgagcctctgcttgtc

SEQ ID NO: 30135 - DNA, 65 bp, Mus musculus
gctgccattctatacttctgtggtctcatctttgtctttgtgtgtgctctaactgtcctaaactg

SEQ ID NO: 30136 - DNA, 65 bp, Mus musculus
gtagaagacgataccacgcatggttaactgaaggataatgcttgctgtcttggaagatgtgtata

SEQ ID NO: 30137 - DNA, 65 bp, Mus musculus
gaggtagaaacgtactcccaagatgggtgaaattggtcttccagctctattgtcttgttcctatg

SEQ ID NO: 30138 - DNA, 65 bp, Mus musculus
gctacagagaactcaacacccaaggtgaccgttttggcaactgtggtgtgatcagagatgcatac

SEQ ID NO: 30139 - DNA, 65 bp, Mus musculus
gctatgtgtaacccaacgactgagaaatacagagctggtagacccatcattccaatggcatgggc

SEQ ID NO: 30140 - DNA, 65 bp, Mus musculus
aacagaggcatctctgagttcattgtgatggcagcagacgctgagcccttggagatcatcctgca

SEQ ID NO: 30141 - DNA, 65 bp, Mus musculus
cctgaagaaccatcagaaacagctgaagaggtagttactgttgcccttcgatgcccaaatggacg

SEQ ID NO: 30142 - DNA, 65 bp, Mus musculus
ttcgtgtaacttcagaggggtgtgcaacaacaaaggcaactgtcactgtgttcgaggatggcagc

SEQ ID NO: 30143 - DNA, 65 bp, Mus musculus
ccttgctgtagcagcgactgtgttctcaaacctggtgctcaatgtgcttttggactttgttgcaa

SEQ ID NO: 30144 - DNA, 65 bp, Mus musculus
cagcagcaagtcaaccagcaggagagacagttaaaccaccatatgaaggggctgaaccctcatat

SEQ ID NO: 30145 - DNA, 65 bp, Mus musculus
gcaagctgagtaaatctggatcagaggatgagatgaaggacgctgatgagagcccaggatctgga

SEQ ID NO: 30146 - DNA, 65 bp, Mus musculus
catcaccaccttcatgctccttgactccagctcccagaatgcccttaggggacaggtctatttct

SEQ ID NO: 30147 - DNA, 65 bp, Mus musculus
ggggctaagatggctttcacaggtaaactcaaagcttccaaaggccagccttgtcttgttctctc

SEQ ID NO: 30148 - DNA, 65 bp, Mus musculus; identical to SEQ ID NO: 23716

SEQ ID NO: 30149 - DNA, 65 bp, Mus musculus
acccatccctgtacggccctacattgcaagtgcttaccgctccaagtctccacggtggccatttt

SEQ ID NO: 30150 - DNA, 65 bp, Mus musculus
actgtgatgtttccactctggtcgcctgtgtggtggatgtggaggtctttaccaatcaggaggtt

SEQ ID NO: 30151 - DNA, 65 bp, Mus musculus
ggccctggcagttggtgtggatcagtccaagaatgaagtgaaggcacagaactactttggatcca

SEQ ID NO: 30152 - DNA, 65 bp, Mus musculus
ggaaagtgggaagagtgcattgctattcagttcacttggatcaaaaccaacagagtctccccacc

SEQ ID NO: 30153 - DNA, 65 bp, Mus musculus
ttcatgagcaggtgaccctgagctatggcatgtttgagaacaagcggaacgcagtgcacatcaag

SEQ ID NO: 30154 - DNA, 65 bp, Mus musculus
caggccgatgtcccaggtgagcggtcagtgcccttctcgctgcgacgcgcctcatggagtcccca

SEQ ID NO: 30155 - DNA, 65 bp, Mus musculus
tctgtctggcctggaagtgaggtgctacatacagcccatctgccacaagagcttcctgattggta

SEQ ID NO: 30156 - DNA, 65 bp, Mus musculus
aattccacagccaacgctaccagtaccatgaccacagagcctcctccagaacagatgacagagag

SEQ ID NO: 30157 - DNA, 65 bp, Mus musculus
acctacagatagacaaggtgactgacaaccagacaggggaggtgctcatctcggagaaagtcgag

SEQ ID NO: 30158 - DNA, 65 bp, Mus musculus
gatgcactttcatggagactgactgccatgcattgctgtgagcactttctttgtcgttcagttta

SEQ ID NO: 30159 - DNA, 65 bp, Mus musculus
ttctttgaccctgtcaactagggcaggttgtcctttaggccttgacgcctcatcatttcaacggg

SEQ ID NO: 30160 - DNA, 65 bp, Mus musculus
tcctggcgctgctcagctggccaatggacctagactttagaagcccagaaggctcaggtgccaat

SEQ ID NO: 30161 - DNA, 65 bp, Mus musculus
aaagatgctgagtgcctgatgcctttagcccagccacaggtccttccctggacaaagtctaccac

SEQ ID NO: 30162 - DNA, 65 bp, Mus musculus
atgccctgtctctaacctggggataattggcctgtggaagcaggagtactatgcccgagtgagaa

SEQ ID NO: 30163 - DNA, 65 bp, Mus musculus
tgtggacctcaagctaggtaggattcctggctccatcatggtggattcccagacttcctgagatt

SEQ ID NO: 30164 - DNA, 65 bp, Mus musculus
aacagtggagtttcttgtgctggacaacgccacctattagtgctgtgcttcaggctcaccagact

SEQ ID NO: 30165 - DNA, 65 bp, Mus musculus
cccttgcttccctcctgtggcctcccattaagcactgtctctgctgtgcgtaggctctgctctaa

SEQ ID NO: 30166 - DNA, 65 bp, Mus musculus
atgtgctgtgctgtcagtatctgggttaagagcataaggatctgcacacctatgggccaagtggg

SEQ ID NO: 30167 - DNA, 65 bp, Mus musculus
ctttccaaaagctctggagtgtaaggactttgtttcttgatggaactcccctgtgattgcagtaa

SEQ ID NO: 30168 - DNA, 65 bp, Mus musculus
gccactaccagcttggtgattgattacagggttgaggtcagcccaagacttctgtgaatcctgtc

SEQ ID NO: 30169 - DNA, 65 bp, Mus musculus
ccaggccagaacgtggggtgaagtagcagattcggccagctgtttgaaattctgaacagtattct

SEQ ID NO: 30170 - DNA, 65 bp, Mus musculus
cagcatcctcatagctgtctgcgatgatgccagcatttggcgatgggatcgacttcgataaacta

SEQ ID NO: 30171 - DNA, 65 bp, Mus musculus
acatacagacagaagaaggctgggctggatgtcaggcctcagatgacggtttcaggtgccaggaa

SEQ ID NO: 30172 - DNA, 65 bp, Mus musculus
ctcagaacttgtgtatctacagagctcccctgacttctgcatgaagaatgagaaggtgggatccc

SEQ ID NO: 30173 - DNA, 65 bp, Mus musculus
ggtgtggctcagtgcttgaagatcagaaagatgcagttcttgctgagtcttccctgctggttctg

SEQ ID NO: 30174 - DNA, 65 bp, Mus musculus
ctcactcaagctgttgacaatgccagtgtgtttaccctccataaggaatagaaagtcaccgtgcc

SEQ ID NO: 30175 - DNA, 65 bp, Mus musculus
cccatatttctgtgcatcagaggggtaagaagccaactagcttgtctgccagaacataccttctc

SEQ ID NO: 30176 - DNA, 65 bp, Mus musculus
gggtgcacatccagaggagcctggaagaaccgtattccattaagtttcagataccgttccaccca

SEQ ID NO: 30177 - DNA, 65 bp, Mus musculus
ctcctacttccacaatgtgccaaaagtctacatcccagcattttgtttgcaggagagctgatgcc

SEQ ID NO: 30178 - DNA, 65 bp, Mus musculus
ttacctctcttgtttctgcagcatacttgccctctagctaccatctgctttctatgtccaccatc

SEQ ID NO: 30179 - DNA, 65 bp, Mus musculus
taaaattccctcggagggccccgcttacggtcccggttttgtccagtggcctagggaggttaaca

SEQ ID NO: 30180 - DNA, 65 bp, Mus musculus
ctagcccagagattctgacaggaggaggctgcagtctctaccgagtgacactttgtagctcactc

SEQ ID NO: 30181 - DNA, 65 bp, Mus musculus
aatttgaggagagtctcgatatttgcccctttcaggagagccatggtctgaataataccttcacc

SEQ ID NO: 30182 - DNA, 65 bp, Mus musculus
tgactccagttccctcccgtcccaacatggactgcaaatgagacccacctgcagatgcctggcct

SEQ ID NO: 30183 - DNA, 65 bp, Mus musculus
gctttaccccaggcttgtttgtactgggagctctggaccaatagtgtctctcctagtaacagaaa

SEQ ID NO: 30184 - DNA, 65 bp, Mus musculus
ttttatgccagccagatggctcagcggaagatccgagacatcctggctcaagttaagcaacagca

SEQ ID NO: 30185 - DNA, 65 bp, Mus musculus
gtaaagttgactgtctggtggactggaccttgcttatgaccaagaagtcgggataggttaaaagg

SEQ ID NO: 30186 - DNA, 65 bp, Mus musculus
acgtgttgataggggtcggatttaggaggctgagtgactccctgatggtccatctggaggtttga

SEQ ID NO: 30187 - DNA, 65 bp, Mus musculus
aagaggtgggcactgtttaagcagcaggagcatgagatggagagggacgccatcagatccatgct

SEQ ID NO: 30188 - DNA, 65 bp, Mus musculus
cttatagtgacgcgttggaaggctaaccgaagccatccttacccctatttaatgtagcttggctt

SEQ ID NO: 30189 - DNA, 65 bp, Mus musculus
cgaagagcatgagaagctgtttgacctggttcgaagaatgttggagtatgacccagcgagaagga

SEQ ID NO: 30190 - DNA, 65 bp, Mus musculus
ttccacagcagccgtaaccccagcagatgacaggtgcaggccagcacacgaagagttggagagct

SEQ ID NO: 30191 - DNA, 65 bp, Mus musculus
ttacatatcctctgtactcactttcaccatgcttcgtggcttgtcctaaattttgcccagcaagt

SEQ ID NO: 30192 - DNA, 65 bp, Mus musculus
gctgcgagtgcatcggtccagagtgcattgactatgggagtaaaactgtcaagtgtatgaactgc

SEQ ID NO: 30193 - DNA, 65 bp, Mus musculus
agccgactggcatgcattggtactctcgcctcctttaccgcttggccgaggagttaatgggctga

SEQ ID NO: 30194 - DNA, 65 bp, Mus musculus
tcacctcacttcaggagggcaaggcattatacccatcaggcaaagcggtcaagattgcagcctgt

SEQ ID NO: 30195 - DNA, 65 bp, Mus musculus
taccacattggcacctggctgttggacagcgagaccatgcatcccttgggaatggcggtcaagtc

SEQ ID NO: 30196 - DNA, 65 bp, Mus musculus
gagcctatgatagtctccatttactgtacaatcatgaacagctctgagatcctggagtgatgtgg

SEQ ID NO: 30197 - DNA, 65 bp, Mus musculus
tccttggaaggaggcgcccaatagggtacacgctctaaagatgaagcaggcacaagctttgcctg

SEQ ID NO: 30198 - DNA, 65 bp, Mus musculus
tgtctgcagtctgagtaggccttgttgcggttcctccatctgcctggtctattggtgttctgaga

SEQ ID NO: 30199 - DNA, 65 bp, Mus musculus
gctgtccgtggatttcagccaatcgagatacagcaggtcatagtttctgaatgaaacaggagcag

SEQ ID NO: 30200 - DNA, 65 bp, Mus musculus
tggctgcgattcttcacacgcattccatctgtctttggactgcttactccaatgtttctcggggc

SEQ ID NO: 30201 - DNA, 65 bp, Mus musculus
gcctaaggtcttgcttgcctggctaaaatccttcattcacctttgagtttccatatccctgctgt

SEQ ID NO: 30202 - DNA, 65 bp, Mus musculus
ggggtcgtaaactgaggaagaagcagctcacctccttgaccaagaagttcaagagctatcatcac

SEQ ID NO: 30203 - DNA, 65 bp, Mus musculus
gagcagctgcaggactaccagcacttcgtgaagatgaagtccacactcctcattgagcagcggaa

SEQ ID NO: 30204 - DNA, 65 bp, Mus musculus
aagcttcttgatgggcatccagcacctgcgtccccggccaaagagaagatccctgctatcctgtg

SEQ ID NO: 30205 - DNA, 65 bp, Mus musculus
tccaagcaagcttcaagcatccaggctgagcagcacggctcggtttggctctctgtcgcatcagg

SEQ ID NO: 30206 - DNA, 65 bp, Mus musculus
taccctggctatcagtccaaacactacgcctgcatccggcagaagggtggctactgcagctggta

SEQ ID NO: 30207 - DNA, 65 bp, Mus musculus
ccctgtagaagaactcactgcttttctctgctccatccatcctcacaccaaactcctagctctac

SEQ ID NO: 30208 - DNA, 65 bp, Mus musculus
cggaggaagcctacgtgaagcggctacacctgctggaccaggttttctgtactaagctgacagaa

SEQ ID NO: 30209 - DNA, 65 bp, Mus musculus
tgggaggatcgccccgacttcctgactgtggaacaacgtatgcggaactattactacagcctggc

SEQ ID NO: 30210 - DNA, 65 bp, Mus musculus
tcatggaaagcctctgtggatatgcccacaagtcccagaaccgcagtgaagagtttctcatcacg

SEQ ID NO: 30211 - DNA, 65 bp, Mus musculus
gggcagggaagagccagggttttggtctttgtaagatctaaggaagaccctgaattctgttctca

SEQ ID NO: 30212 - DNA, 65 bp, Mus musculus
agtctgcctgacctgctacacatttctcactggaaacgtactccctcaaggcaaggaggacaaga

SEQ ID NO: 30213 - DNA, 65 bp, Mus musculus
gtgacatggtttacatggtgaggggtagatattgagctgtggccattggatgtgacagggaagac

SEQ ID NO: 30214 - DNA, 65 bp, Mus musculus
aagtgaagaatcaactgcgcttccttgcagaactggcctatgatctggatgtggacgatgctccg

SEQ ID NO: 30215 - DNA, 65 bp, Mus musculus
ccatcctccatggtcccacccatgaccactacccagttcctgacccctccatcacagcacagtta

SEQ ID NO: 30216 - DNA, 65 bp, Mus musculus
agcacccatacctgacaccatccccagagtctcctgaccaatggtcaagctcttcaccacactct

SEQ ID NO: 30217 - DNA, 65 bp, Mus musculus
gagccatcgagagagccaagcaggtcacggctcctgagctgaactccatcatccgacagcagctc

SEQ ID NO: 30218 - DNA, 65 bp, Mus musculus
gtggacaccggaaggagatactatgttgcattaaataaggacgggactccaagagaagggaccag

SEQ ID NO: 30219 - DNA, 65 bp, Mus musculus
aaaagctcggaaggtacacttcgctgagaaagtcacagtccatttccttgctgtctgggcaggac

SEQ ID NO: 30220 - DNA, 65 bp, Mus musculus
gttccaagtcctccctccgtctcccccttgtcggtccgacgttttgggcctggaaagtgggacaa

SEQ ID NO: 30221 - DNA, 65 bp, Mus musculus
aatgtggtggatgaagggttctacttcactcccaagggagatgacccatgcttgagctgtacctg

SEQ ID NO: 30222 - DNA, 65 bp, Mus musculus
ccccgcaagaacacttaactgcgacgaggagattcgtttccaaaccaaaggagaccaactgtact

SEQ ID NO: 30223 - DNA, 65 bp, Mus musculus
gagagctccctcccacatttacccagtaggcatacctgccacaccagtgtctggacacaaaatga

SEQ ID NO: 30224 - DNA, 65 bp, Mus musculus
tccaggatactgtggaatagccacctcttgaccagtcatgcctgtgtgcatggactcagggccac

SEQ ID NO: 30225 - DNA, 65 bp, Mus musculus
tctgctctatagtcaggtcctgtttcatgatgtgactttcacaatgggtcaggtggtatctcggg

SEQ ID NO: 30226 - DNA, 65 bp, Mus musculus
cccaacagcttctatgggcaggtgagttaggaaggactaatcacagagattcctgactgactctg

SEQ ID NO: 30227 - DNA, 65 bp, Mus musculus
gattggaagtcattcctcggttgcactagccacacaaaatgctcagtcaccatcccccgggcacc

SEQ ID NO: 30228 - DNA, 65 bp, Mus musculus
actgtggaagtagattgtgacatgttccagaacctgaccggctacagaagtgtccttgtggtggc

SEQ ID NO: 30229 - DNA, 65 bp, Mus musculus
cccatgcccacactacaggcccggagctttggggctgggtacatgtgccaagcctccctccctgg

SEQ ID NO: 30230 - DNA, 65 bp, Mus musculus
aacgtcgtcttccggctcgaaggttctggattacagagacccaaggtcctcaatgtcggggacat

SEQ ID NO: 30231 - DNA, 65 bp, Mus musculus
ggctcatcatcacaggatccagggactgtgcctcggtgtaccacatcaagtactgacaacttcaa

SEQ ID NO: 30232 - DNA, 65 bp, Mus musculus
gcagaaggatggagccaactactgtgtgacatgctttgactcgcattgtgccaatatctgtcagg

SEQ ID NO: 30233 - DNA, 65 bp, Mus musculus
acataccagaagcccgacaagcaggaggagttttacgcttagcagagagagccacagtgcctcct

SEQ ID NO: 30234 - DNA, 65 bp, Mus musculus
tagccaaggtccttctcaggcatctatccttaacttggtctctccacaagctgcctctgatgctc

SEQ ID NO: 30235 - DNA, 65 bp, Mus musculus
tctccgcaatttggaggaaaggtgcggtcatggtttggagaaagcacacctgcacagaggagtgg

SEQ ID NO: 30236 - DNA, 65 bp, Mus musculus
agattttctcattgggccactgtcccaatcaggactggttggctgtggggatggagagcagccac

SEQ ID NO: 30237 - DNA, 65 bp, Mus musculus
aagatcgttatgaaggttgggcaagatccaaatgctgtgacacccgagcagttgactaccagccg

SEQ ID NO: 30238 - DNA, 65 bp, Mus musculus
agggatcctacgaccctcttagcccagaggaacaagagctgctggactttaccaactggttctga

SEQ ID NO: 30239 - DNA, 65 bp, Mus musculus
tggtagtggctgatgctggcaaccactgctttaaggcctatcgatacctccagtagctgcacaag

SEQ ID NO: 30240 - DNA, 65 bp, Mus musculus
tgtgaagatgcagagtggcagggaaggtcacagagctccaccacccatgtcctgtgtcaacaacc

SEQ ID NO: 30241 - DNA, 65 bp, Mus musculus
gacaatgatggcttggagggaaacaaggtgctttcttccactccagacttggggcttaaagtacc

SEQ ID NO: 30242 - DNA, 65 bp, Mus musculus
tctgcactggccacaccctcaaaagagacaccctaactcttgctcactccctaaactcttcaagt

SEQ ID NO: 30243 - DNA, 65 bp, Mus musculus
gatgtagaatgctttgaccaaatgggctggtctagtgcaccttgtaagcagcagcctagggcttt

SEQ ID NO: 30244 - DNA, 65 bp, Mus musculus; identical to SEQ ID NO: 23716

SEQ ID NO: 30245 - DNA, 65 bp, Mus musculus
ggtcagtctttgggctctgagcctatcgtcttggaagagattgatgcctacagccatgcccggtg

SEQ ID NO: 30246 - DNA, 65 bp, Mus musculus
aaagaggtatgatgcctatttactcccatctaagaaagcccttactttgtgttcataagataatc

SEQ ID NO: 30247 - DNA, 65 bp, Mus musculus
cttgacattacagccaaaatggtgctgtcccagagacaacgagatgaactaaatcgagctatagc

SEQ ID NO: 30248 - DNA, 65 bp, Mus musculus
ctgggaatgccccctgtagctggagttagtctggttttgctgctttagcaagggaacctgcggag

SEQ ID NO: 30249 - DNA, 65 bp, Mus musculus
aaagagttttttcaatgcgccagtgactgaagaagcagtcccccatgtaaccatgagagagccag

SEQ ID NO: 30250 - DNA, 65 bp, Mus musculus
cactcttagctttgataacttgacctgtggtatctctcgtggagaggtgtggctggctgagacag

SEQ ID NO: 30251 - DNA, 65 bp, Mus musculus; identical to SEQ ID NO: 531

SEQ ID NO: 30252 - DNA, 65 bp, Mus musculus
ggaccttaacctggacaagtgctacgtgattcctctgaacacttccatcgttatgccgcccaaaa

SEQ ID NO: 30253 - DNA, 65 bp, Mus musculus
ggtgatcatgtgactctagggatgccgatctatgtatccttccaaatacagtgtttacatggagt

SEQ ID NO: 30254 - DNA, 65 bp, Mus musculus
tgggctctgagatccgagactctgtggtatgagagctgactttagatgtggtcaccctgacctca

SEQ ID NO: 30255 - DNA, 65 bp, Mus musculus
cattgctccccacctagacctccttctccatcccgctcatcgtctctctgccaacgttttgtgaa

SEQ ID NO: 30256 - DNA, 65 bp, Mus musculus
ggtttgctgttctctcttggactggaatgtttggcaaggcccatgtaaactggttagagcaggcc

SEQ ID NO: 30257 - DNA, 65 bp, Mus musculus
ggcagttcgtgtgaatctctcagagggaatgcaactggtccctgtgatcttttcaccttcgtttc

SEQ ID NO: 30258 - DNA, 65 bp, Mus musculus
ctgcctaccacgacatctccctagacaagtgctacgtcatcgagctcaacaccaccatcgtgcta

SEQ ID NO: 30259 - DNA, 65 bp, Mus musculus
atgccctctgttcaagctactttccctagtttctgttgtgcccttccaccttccagtgttgggca

SEQ ID NO: 30260 - DNA, 65 bp, Mus musculus
tgaatttacatacttgtaacatgaacgggctctgcttaagctctgccaaagtcaccatttcctgg

SEQ ID NO: 30261 - DNA, 65 bp, Mus musculus
agcgcagtcactgggacctgctaacgctgctggaaggggctggaccgactacgcaggaggcccgt

SEQ ID NO: 30262 - DNA, 65 bp, Mus musculus
tgggccttgtagattctacctctttttgttgctggtccagcttgcttcctgagccacactcgagg

SEQ ID NO: 30263 - DNA, 65 bp, Mus musculus
ttgtcaggataactagcatttcccacagcctccaggagagcttcaagggctacgaagaaacccct

SEQ ID NO: 30264 - DNA, 65 bp, Mus musculus
ggtgctttaacccctttgctttgctttgttcacccttgcctccttgaagctccaggtgccacttt

SEQ ID NO: 30265 - DNA, 65 bp, Mus musculus
atttgagggtgtctggtggaaatgggtaatctccgaggatgtctgcagcctgcttgttgtgagct

SEQ ID NO: 30266 - DNA, 65 bp, Mus musculus
tcacggatttcaccgttcaccagtgtcgacctgcgtaagcgatcggagtctgaaagtagcttggt

SEQ ID NO: 30267 - DNA, 65 bp, Mus musculus
caactcgtgacagtaattcaccacccctaagaccttgaatcaccctagtggaaataggcaaggag

SEQ ID NO: 30268 - DNA, 65 bp, Mus musculus
agcagtgtgaacaagctgtgtaccagaccattttggaagaggatgtggaagatcccgtgtaccag

SEQ ID NO: 30269 - DNA, 65 bp, Mus musculus
tcagttccaattccaccccacctagccccactctcatacctagggactgctccgaagcagaagtg

SEQ ID NO: 30270 - DNA, 65 bp, Mus musculus
acaaagcagaggcaggaacttagaagtatcagagacaaaccgggacattcagccttggcaagccc

SEQ ID NO: 30271 - DNA, 65 bp, Mus musculus
ttattgaaggctccacagtgcaagaatatgaaccccttccctggtcaaccgatgtgggccaagag

SEQ ID NO: 30272 - DNA, 65 bp, Mus musculus
acttttccattcaaccaaatcttcaggaaaccctttggaagaaagccaggaccaatgcaaatgtg

SEQ ID NO: 30273 - DNA, 65 bp, Mus musculus
ttctcagatgggatgctcttcacagccacggtgactgacttcctagccatcgacgctgttatcta

SEQ ID NO: 30274 - DNA, 65 bp, Mus musculus
attacaggattaactgaaggccagcatgggttccacgtccatcagtatggggacaatacacaagg

SEQ ID NO: 30275 - DNA, 65 bp, Mus musculus
cgcagccagtacattctcatacacatggtttcgaggacacaacagtacctcccaataccaacctt

SEQ ID NO: 30276 - DNA, 65 bp, Mus musculus
aattctgccatgaagaagggcacagaggtcttccagagtgagagtcagaggaagccacaagtgtc

SEQ ID NO: 30277 - DNA, 65 bp, Mus musculus
caggcatcaaacaagaagaattggtgggatggctctcacctccagtctatgggaacttcaagcct

SEQ ID NO: 30278 - DNA, 65 bp, Mus musculus
cctaaaacccttacttagtctccacttccctaaaggtagcttaaccaacgtttgagcttgcttga

SEQ ID NO: 30279 - DNA, 65 bp, Mus musculus
actgtggcatcaccactctctgaccccagtagtccctcggcttcagaagacttcacctatggccc

SEQ ID NO: 30280 - DNA, 65 bp, Mus musculus
cctgcaccccagggagagcagctccttagagagagtatttgggaacctttatgttgctcattaaa

SEQ ID NO: 30281 - DNA, 65 bp, Mus musculus
gtcccttgattgccacagccttcaccaatgggtaccactgaaacagggaggaggtagcaggagcg

SEQ ID NO: 30282 - DNA, 65 bp, Mus musculus
cagtattagagtcacttgaggaagttactaggaaacgccataagtctccaagtacattgtgagtc

SEQ ID NO: 30283 - DNA, 65 bp, Mus musculus
agtttgtggatccgctcacgagacatcgcctgcaagtgtcccaaaatcaagcccctcaagaagta

SEQ ID NO: 30284 - DNA, 65 bp, Mus musculus
ccgctagccagtttgaagcttgtagagttgcaccctatgtcaacgtaggtgctttaaggatgcca

SEQ ID NO: 30285 - DNA, 65 bp, Mus musculus
caacactacggccatcacctttgacgaattcaccattgtgaagcctgatcctccagaaaacgtgg

SEQ ID NO: 30286 - DNA, 65 bp, Mus musculus
gcctgatggtagacatcgattccattaactgcattcttttggtcactgaaataaaagctcgcaag

SEQ ID NO: 30287 - DNA, 65 bp, Mus musculus
aaaccaccctgcacagaatctatgggaagttcttaggcctgcgtgcttacatcaggaaacagatc

SEQ ID NO: 30288 - DNA, 65 bp, Mus musculus
cttggacaaactatagagtgctgccgactgcgtggaaagcaacataaatgggcatgctctcccag

SEQ ID NO: 30289 - DNA, 65 bp, Mus musculus
aacccctcactggtcttgcatgagctagagggttgggaagctgggctcattccacgcattgcctg

SEQ ID NO: 30290 - DNA, 65 bp, Mus musculus
agttcctggtgaaagtgttgatccctctacacactgtcaggagcttgtcactctttcatgcacag

SEQ ID NO: 30291 - DNA, 65 bp, Mus musculus
aggagaagctcaactacaagatggagctgagcaaggagatccgcgaggcgcacttggcagcgctg

SEQ ID NO: 30292 - DNA, 65 bp, Mus musculus
agctcagtgtaaggaccttggacatctgcgacattctcctgggaagacatgattccgccatcttc

SEQ ID NO: 30293 - DNA, 65 bp, Mus musculus
agggagagctaagcccgatggagcaggagctgcttgacttttccagttggttagggggctactga

SEQ ID NO: 30294 - DNA, 65 bp, Mus musculus
agtgctactgtgagcggacatgcactgtgaagggaaccacctaccgagagtctgagtcctggaca

SEQ ID NO: 30295 - DNA, 65 bp, Mus musculus
acatcaccctgcctttatgtgctgaggcacattcctgtctcccatcctccctcccattcatgtct

SEQ ID NO: 30296 - DNA, 65 bp, Mus musculus
gtgacctactgatactagctgtaactgatactagctgttaagggtgaaatgctgaccactcctgt

SEQ ID NO: 30297 - DNA, 65 bp, Mus musculus
ggccagagcacagagattcacactcaatgaacatgtgattctttccccaagcccatgtctgtctc

SEQ ID NO: 30298 - DNA, 65 bp, Mus musculus
gtatacagtgcactagaagcagttacctactgtgtgcccaccagaggctcattgacaccaactca

SEQ ID NO: 30299 - DNA, 65 bp, Mus musculus
gtcagcacctggaaacacctgccttcctaatgtagagcatcctaaagaaagcacgcatgagctca

SEQ ID NO: 30300 - DNA, 65 bp, Mus musculus
cttggtgaccaacacttaccagggacctgtgaatggtggctgccatccttaagtttgcttcctcc

SEQ ID NO: 30301 - DNA, 65 bp, Mus musculus
gttctttccatcaccctaacctctcctgcgcattcacacaagagtttcttgtaagccatcaaaag

SEQ ID NO: 30302 - DNA, 65 bp, Mus musculus
atccacgctgatcctggctgagatttgccaagagaaggctccattttagtgaccaacattcagcc

SEQ ID NO: 30303 - DNA, 65 bp, Mus musculus
taactctgcagctttcaaagctcgaacaaaagctcgaagcaaatgccgagataagagagcagatg

SEQ ID NO: 30304 - DNA, 65 bp, Mus musculus
tgcgcaatctcgagagcaggcagacccatacacctgcataaacaccacagggtgagcatccggat

SEQ ID NO: 30305 - DNA, 65 bp, Mus musculus
ctgtgcgtacagtgactgtcctgtttacagaaggcagcccttttgctaagattgctgcaaagtgc

SEQ ID NO: 30306 - DNA, 65 bp, Mus musculus
ctgctggtgtcttgactgctctgccaggcaatcctgaacatttgggcatgaagagctaaagtctt

SEQ ID NO: 30307 - DNA, 65 bp, Mus musculus
aaatggagccaaagccaacggagttcccactagctcctctggatcgacatctccaataggctctc

SEQ ID NO: 30308 - DNA, 65 bp, Mus musculus
aactttccggtgtacaaagattgactccctgtctgggcttagacgagacgcagagcactgcactt

SEQ ID NO: 30309 - DNA, 65 bp, Mus musculus
agaagagtggaatgggaccgtagaaccactttggtttaccctctgcactgggccaagaacttgct

SEQ ID NO: 30310 - DNA, 65 bp, Mus musculus
gaggaggagctgtaccccgaaaacctgtgtctgaaatgcccatggagagagacagaggggcagct

SEQ ID NO: 30311 - DNA, 65 bp, Mus musculus
cagatcggcatgaaacgcttgaaggtgcagctgaaacgctccaaaaacgacagcaaaccttactg

SEQ ID NO: 30312 - DNA, 65 bp, Mus musculus
gaaagcaagtccaagcagcgtacaaatccttctcctaccaaccctttctccagtgacttacagaa

SEQ ID NO: 30313 - DNA, 65 bp, Mus musculus
taccagcacgagtacgtagatcagcccaaaatgagcgaggtggtggctcagatggcactggagga

SEQ ID NO: 30314 - DNA, 65 bp, Mus musculus
atggggaggagtcggattgcttgacagagtatgaggaagatgcaggaccagactgctcaagagat

SEQ ID NO: 30315 - DNA, 65 bp, Mus musculus
taatgtagggtggcctagggagccaaagaaatgcccaacggacttgagagcagaacccaggagtg

SEQ ID NO: 30316 - DNA, 65 bp, Mus musculus
aacaggggagatggaggtgcgcaacccactgtttgaccattccacgctgtcagcaccagtgcctg

SEQ ID NO: 30317 - DNA, 65 bp, Mus musculus
agatctcctttgtgatcccctgcaacaaccactgaggatctgccttgcactctggagaacatggt

SEQ ID NO: 30318 - DNA, 65 bp, Mus musculus
tagtgaacacaaacgggtgactttggcagtgccagcctcctcaacttgttctaggctttagcagg

SEQ ID NO: 30319 - DNA, 65 bp, Mus musculus
tgatcttatccctcttggctgatacccgacgtctcttaaaggtgtgaacccgcctatttcccagg

SEQ ID NO: 30320 - DNA, 65 bp, Mus musculus
gcttctcccatttcctgatctagtgctcccaagactttgatccttggaaactgtctagcactgaa

SEQ ID NO: 30321 - DNA, 65 bp, Mus musculus
ccatggatggtagaagtgtaaactgtgcagtcactgtggacatcaatatgcaggttcttcacaaa

SEQ ID NO: 30322 - DNA, 65 bp, Mus musculus
gaaatgtaccaaagtcggaggctcagatcaagccaaagctaaaatcgcttgcttggccgggattg

SEQ ID NO: 30323 - DNA, 65 bp, Mus musculus
tcagacaaatacagaccgctgtcatgccaaacggaactcctcacccaactgctgcaatagtccct

SEQ ID NO: 30324 - DNA, 65 bp, Mus musculus
atcaccatcgtgagctttggctactcgctgtacgcaggttggatcggtgctgtgatgtgcctggt

SEQ ID NO: 30325 - DNA, 65 bp, Mus musculus
tttcccaattgtttatctcttgtttggagttgtatcagaaagacctggaggatgattctttgagc

SEQ ID NO: 30326 - DNA, 65 bp, Mus musculus
tacatagtgcaactacagatagaagacctgactcgtaaactgcgcacaggagacctgggcatccc

SEQ ID NO: 30327 - DNA, 65 bp, Mus musculus
tggaggaaactgcggctgatcacattcaacagaaacgagaagaacctgacgatttacacgggcct

SEQ ID NO: 30328 - DNA, 65 bp, Mus musculus
tttctaggcatggtgggactccgctgcaccaacgtgggcaacatggatctctccaagaaggccaa

SEQ ID NO: 30329 - DNA, 65 bp, Mus musculus
tggcccagggtagggtaggaacagcctcatggtcttcagagtttgccccttcctgagggaaagac

SEQ ID NO: 30330 - DNA, 65 bp, Mus musculus
ggaaaatgagtctgaagtgctgggctacaagatcctctatcggcagaaccgacagagtaaaactc

SEQ ID NO: 30331 - DNA, 65 bp, Mus musculus
gctaatggggttgccttgtggtcacgtgtttcaccagaattgcattgttatgtggttggctgggg

SEQ ID NO: 30332 - DNA, 65 bp, Mus musculus
ggattgagcaacaagtttgataccgaatttccgtcagttctgacagggaaggtggctccagaaga

SEQ ID NO: 30333 - DNA, 65 bp, Mus musculus
attaacgatgacggcagcagcgaccctagagatatagaccaggacaaccgaagcacatcccccag

SEQ ID NO: 30334 - DNA, 65 bp, Mus musculus
aacattgtggtgttataccaacagacccaagtggcacgtctaagaggcactatctgcataaattc

SEQ ID NO: 30335 - DNA, 65 bp, Mus musculus
aaagcaaatgccgaggcaaagagcacatgatccagaacgaggtctccatcctacggagggtgaag

SEQ ID NO: 30336 - DNA, 65 bp, Mus musculus
gcccctccatgatgtgcttagatcggaagtgcctacagattcaagccctgaatatgagcagctgc

SEQ ID NO: 30337 - DNA, 65 bp, Mus musculus
atatttcagacatctgtgaaaatgggagacctcgcagtaactcctggcaaggtaacatgggaggc

SEQ ID NO: 30338 - DNA, 65 bp, Mus musculus
ttgacgatggctggttcgctagccgggaatttgcaagaactctcagcccgttacctgagctcctc

SEQ ID NO: 30339 - DNA, 65 bp, Mus musculus
ccttatgctcgtaaccgtcctccttttggtcaggggtatgcccaacctggacctggttatcgata

SEQ ID NO: 30340 - DNA, 65 bp, Mus musculus; identical to SEQ ID NO: 23716

SEQ ID NO: 30341 - DNA, 65 bp, Mus musculus
cattttgcctaataccctctgattctgttacttcctgatacacgctaactcttctatcctagtca

SEQ ID NO: 30342 - DNA, 65 bp, Mus musculus
gaccctgtccgggactttcaccgggtccagaggggctatgccatctgccagaccacacgcccgct

SEQ ID NO: 30343 - DNA, 65 bp, Mus musculus
tctcccgacagtaaaacgcttgtctctgctggaggatatctcaagtggtggaatgttgccactgg

SEQ ID NO: 30344 - DNA, 65 bp, Mus musculus
gattggttgcgccaagttttcgtcgatcctctgctgtacagtcccctaaggcttctttccgattt

SEQ ID NO: 30345 - DNA, 65 bp, Mus musculus
aaatgaagatggaagcgaagctgcagcatccacaggcataaacattcctgcgatcatgagtttga

SEQ ID NO: 30346 - DNA, 65 bp, Mus musculus
agtgtcccaacctcaccgacagcctgttggagaaggtgggctccatccaagtggagtctggaccg

SEQ ID NO: 30347 - DNA, 65 bp, Mus musculus
aagaagatcacaaaggtgtcatgatggagctgagcgaggattgctcctgcatccaggatcgcttc

SEQ ID NO: 30348 - DNA, 65 bp, Mus musculus
aaacacaacgagaggcaggatgaccatggctacatttcccgtgaatttcaccgtcgctaccgtct

SEQ ID NO: 30349 - DNA, 65 bp, Mus musculus
aggccaggctaagattcaggtctttgaaaagggcgacttcaacggtcagatgtacgaaaccacgg

SEQ ID NO: 30350 - DNA, 65 bp, Mus musculus
gggaaatctgtgatgactacccttccttgcaagccatgggttggttcaacaatgaagttggttcc

SEQ ID NO: 30351 - DNA, 65 bp, Mus musculus
ggacagactccctcagctctctgaggcccatcaaagtggacagccaagagcacaagatcatctta

SEQ ID NO: 30352 - DNA, 65 bp, Mus musculus
accaagtgaaagccttttggttgctcttcataccccaggaaggaagatgaaagccagggacaccc

SEQ ID NO: 30353 - DNA, 65 bp, Mus musculus
tgatgactacccatcactgccttccatgggctggaccagcaaagatgtgggttccctgaaagtca

SEQ ID NO: 30354 - DNA, 65 bp, Mus musculus
ctgctgtgctcctggtacgcatgagcttggctcagactccattgagactacggcaggatctaata

SEQ ID NO: 30355 - DNA, 65 bp, Mus musculus
accgtggagaacgtgacagtgtttggaacggcctcagccagcaagcacgaggtgctgaaggagaa

SEQ ID NO: 30356 - DNA, 65 bp, Mus musculus
tagcgaagttagggaaagccagcccacctctttccccacagaccttctggagcttaggaggtttt

SEQ ID NO: 30357 - DNA, 65 bp, Mus musculus
cgaggttttcagtacatcctggagagcgatcaccactcaggtgactacaagcacttcagagagtg

SEQ ID NO: 30358 - DNA, 65 bp, Mus musculus
ttcttggtcatctggcaagtgagttgaaggaaccgtgcctgagttggccatcacagctcaacact

SEQ ID NO: 30359 - DNA, 65 bp, Mus musculus
cgcttccttccaagtcctgtgtacttaaaacaggccacgtggggcaatgagtaagaccatgcatg

SEQ ID NO: 30360 - DNA, 65 bp, Mus musculus
agggcctgaagaagatatctgactacatgaagagcagccgcttcctctccaagccaatctttgca

SEQ ID NO: 30361 - DNA, 65 bp, Mus musculus
atttgatctcttgttgtgccaagaatcgtcacggatgcaacagtggaagcatagatagggcctgg

SEQ ID NO: 30362 - DNA, 65 bp, Mus musculus
tccaaatgagccacctgtctgccccagagtggagtggtgtgtgaatggaaaatgtgtgcttgctt

SEQ ID NO: 30363 - DNA, 65 bp, Mus musculus
gggctgcccatggtgctcccactaatctcaggagatggtaacgctcatcttcaaggagttcccag

SEQ ID NO: 30364 - DNA, 65 bp, Mus musculus
tgttgggatcagagtcgccctcccatccagcagcatgcttcccggctccacttcacaactttcta

SEQ ID NO: 30365 - DNA, 65 bp, Mus musculus
ctgagcacatcagcagactttgtagcagctcacccagacttacagaattgtgtcccacagaaacc

SEQ ID NO: 30366 - DNA, 65 bp, Mus musculus
tggggacgctgagtgacagggaaggcatcgccaaatcagcggctctgagtgtgcctcagctcttt

SEQ ID NO: 30367 - DNA, 65 bp, Mus musculus
agagacttggaaagtgcccagagcttgaaccggatggaatacatcgtatagcagacagtgggctg

SEQ ID NO: 30368 - DNA, 65 bp, Mus musculus
ttcagcagctaggcctcttctgtagcgtctttaccatcagcatgtacctctccccactggctgat

SEQ ID NO: 30369 - DNA, 65 bp, Mus musculus
accggggagttcctgaaagactagttagggacatttgctcatctccttctgaggccatctgcaga

SEQ ID NO: 30370 - DNA, 65 bp, Mus musculus
ttcctgaggagttccctggctgcagggctctagccttccatgcgcctactgaatgcatgaagagc

SEQ ID NO: 30371 - DNA, 65 bp, Mus musculus
gaaccagttcattgcatgctgacgcgacattgttggtcaagaatccagtttctggcatagcgcta

SEQ ID NO: 30372 - DNA, 65 bp, Mus musculus
cctccaggtggtgggtccaatttttcattaggctttgatgagccagcagaacagcctgtgaggaa

SEQ ID NO: 30373 - DNA, 65 bp, Mus musculus
cttagctgtaacgagaacgatgctgaacacctggatcgtgaccagccctaccccagcagccaaaa

SEQ ID NO: 30374 - DNA, 65 bp, Mus musculus
aagtcttctcttatggaagagccccataccccaagatgtcgctaaaggaggtttcagaggctgtg

SEQ ID NO: 30375 - DNA, 65 bp, Mus musculus
gatgtatgggcatttgggatcctgatgtgggaggtgtttagtctagggaagcagccctatgactt

SEQ ID NO: 30376 - DNA, 65 bp, Mus musculus
acctcatcgaacatccagaccctatctttgaccctaaggagaaggatctgaacgagacgctgctg

SEQ ID NO: 30377 - DNA, 65 bp, Mus musculus
ggcattaagaactgcatctgtgccagagatttactgttactgtttagaaagtccaagctgaatag

SEQ ID NO: 30378 - DNA, 65 bp, Mus musculus
cagagaacagacatctgctggatgcctctcagtggagaatgggattccttcacttggtggtgaag

SEQ ID NO: 30379 - DNA, 65 bp, Mus musculus
agactgaactcctgggagacaatgacacgctccaggtgaccgaggcggctcatgtccagcttgaa

SEQ ID NO: 30380 - DNA, 65 bp, Mus musculus
ggacggatcatagcttggaaacccacttcttgggtcttagcatgtttgcttagactctgtaggtc

SEQ ID NO: 30381 - DNA, 65 bp, Mus musculus
aagataacccagaccagagggatgtggaccacgactttgtgggtgatgcctgtgatagtgaccaa

SEQ ID NO: 30382 - DNA, 65 bp, Mus musculus
ggcaaactcttcaccacattaaggaaacttggatttggtgtctgtcaggcagcagagcagcaggc

SEQ ID NO: 30383 - DNA, 65 bp, Mus musculus
aagagccaccgtctctggaacaaggtggtctgtggtacgactcatgtaaccagacaggttagagt

SEQ ID NO: 30384 - DNA, 65 bp, Mus musculus
gagctctctgacatcttctacttttgccggaaaggaatggagactatcatggatgatgaagtgac

SEQ ID NO: 30385 - DNA, 65 bp, Mus musculus
gactcttaaagatcgctctgagcttgtcctaaaacagcttcaggaaatgaaacctactgtcagtc

SEQ ID NO: 30386 - DNA, 65 bp, Mus musculus
atcagacactgcacaagcagagtagcccaacaccaggaagcatttatgaggaaacgccacacagc

SEQ ID NO: 30387 - DNA, 65 bp, Mus musculus
tttccgttcactcacaaggccctctacctggtctccatactcctgagactatttccccatcctgt

SEQ ID NO: 30388 - DNA, 65 bp, Mus musculus
caccgcatcctccatcacacagcatgtgcaatacgccaaaatcactctcagtcattcctgtcaac

SEQ ID NO: 30389 - DNA, 65 bp, Mus musculus
gttgggtagaagaaacatgtgaaagcatcgataccccggagtgtccagcagagtttgaatcaccc

SEQ ID NO: 30390 - DNA, 65 bp, Mus musculus
cgaaatcagcaagaggaaagcaacatcgggaagcatcgagagctgcgagaagattccatcagatc

SEQ ID NO: 30391 - DNA, 65 bp, Mus musculus
ccatgatgggcttagatacccccaagaggtctgagtgtagcaataggaattcccagtgtgctttc

SEQ ID NO: 30392 - DNA, 65 bp, Mus musculus
aaggagaagcaggccttacagactgtgtgcctgaagggcaccaaggtgaacttgaagtgcctcct

SEQ ID NO: 30393 - DNA, 65 bp, Mus musculus
ggttggactagtgggcggaatgtccacggctggtgacggtgagcgcggtactgtgggacaagaag

SEQ ID NO: 30394 - DNA, 65 bp, Mus musculus
cgccgagtaacgaggcttgggagaacctggattctgacattcgcagaggactggagaacaatgtc

SEQ ID NO: 30395 - DNA, 65 bp, Mus musculus
agggtgcagaacagacaagtcccacacagcagcttggtgcacacctagcagacaccatgaggacc

SEQ ID NO: 30396 - DNA, 65 bp, Mus musculus
ctttcaccctggctttgcagtcgccctaggaataaacaagagtgtgaagcctctctgcagtgtct

SEQ ID NO: 30397 - DNA, 65 bp, Mus musculus
aagtatcacctccaagcaccgggaaaggactgactcaacccaacgagctgtctctgtagctaata

SEQ ID NO: 30398 - DNA, 65 bp, Mus musculus
tgagaagcctgatgacatcaaaagcacatccagtcggctctggctcaagttcgtctctgacgggt

SEQ ID NO: 30399 - DNA, 65 bp, Mus musculus
ggaagtgctgggcattggggatgtagggatatcatcttggagatggcagaggagttgttagatga

SEQ ID NO: 30400 - DNA, 65 bp, Mus musculus
gagtttcggtttgatctgacccagattccacatggagaagcagtgacagcagcagaattccggat

SEQ ID NO: 30401 - DNA, 65 bp, Mus musculus
ctccagacccctcaccagaaagtaaaggttcagtctttgccttctactagaccccaaactctcct

SEQ ID NO: 30402 - DNA, 65 bp, Mus musculus
cccaggccattccaccccagtctcatcagcccatgcagccccagtcacctctgcatcccatgcag

SEQ ID NO: 30403 - DNA, 65 bp, Mus musculus
caaatgccatagtctgctgtggttccatcattcaagtgtgcatctgtgcagtctggctgggaaca

SEQ ID NO: 30404 - DNA, 65 bp, Mus musculus
aagaggaacactgatgaaactgttggtggaagagtccccactgttgacaggagcatccagctgac

SEQ ID NO: 30405 - DNA, 65 bp, Mus musculus
gatccaacccgtagaaaagtctgtcactgtgacttgtgagttcttcgaatctcaggctcaggtcc

SEQ ID NO: 30406 - DNA, 65 bp, Mus musculus
catctgtctgtcagggtaccccttcactgtgcttccatgggctattttgtccgtgtactttactg

SEQ ID NO: 30407 - DNA, 65 bp, Mus musculus
ttaacatgaggttaccctactgtctttgaacagcgccacctctaggcatgctgtccttgagttat

SEQ ID NO: 30408 - DNA, 65 bp, Mus musculus
ttaacatgaggttgccctactgtctgtgaaccataccacctctaggcacactgtccttgagttat

SEQ ID NO: 30409 - DNA, 65 bp, Mus musculus
catcctttgactcacaagatcttttccaccatcttctttacgtttctctgagccttggatgaggg

SEQ ID NO: 30410 - DNA, 65 bp, Mus musculus
caagcaagttccaaagccagcctggaacatcagagccacaagtttcacagccacaaggacaagct

SEQ ID NO: 30411 - DNA, 65 bp, Mus musculus
ctgcaaggcaaatctcatgcataatcttggtggggaagaagtttcagtggcctgcaagttattcc

SEQ ID NO: 30412 - DNA, 65 bp, Mus musculus
aggaacgcaacaagcctgcctacgagatcaacagagaggcctgcgatgactacaagctgtgtgag

SEQ ID NO: 30413 - DNA, 65 bp, Mus musculus
gtgcaggtatctcttgactatgaggtaggctggataaccttcgtcaatgctgtcactcaggagca

SEQ ID NO: 30414 - DNA, 65 bp, Mus musculus
tgccatgcagctgtgtctaagtctgactctttgagagcacctttgcacttgtctgagtacaaagg

SEQ ID NO: 30415 - DNA, 65 bp, Mus musculus
tctattggaggccttgtctgacatgggtctccatgagggagtcaggctgctgaaaggtcctgaga

SEQ ID NO: 30416 - DNA, 65 bp, Mus musculus
cagactttgccttttcacaaaggtggagcgtgaataccagaaggacccagtattcggttacttaa

SEQ ID NO: 30417 - DNA, 65 bp, Mus musculus
cagtgagtcagagatcagcttcacctacaagcaaaaccctgccttacccctcaacctttccataa

SEQ ID NO: 30418 - DNA, 65 bp, Mus musculus
aaaacatggtgtagctagccactgtgcacctcctcactggtgcaggctgctggcatggtgatgga

SEQ ID NO: 30419 - DNA, 65 bp, Mus musculus
tgagaaatagagccctaagggacttagcctcagacacctcttcagagcagaaccggacactagca

SEQ ID NO: 30420 - DNA, 65 bp, Mus musculus
gacaggattgcattgcatcaggaacattcacaacatccatccttctagccagttttgttcactgg

SEQ ID NO: 30421 - DNA, 65 bp, Mus musculus
aggctggacctggagcccgagagaaggactgaacttgggtggcctgaagagctagcacacgctgg

SEQ ID NO: 30422 - DNA, 65 bp, Mus musculus
aaccagaggaagctgctccatgcatacataggggaagttagcaggcaattctgagctcggcttcc

SEQ ID NO: 30423 - DNA, 65 bp, Mus musculus
tctgcatggatgaccatcctgtctccagctgcggattctacaccagatccaggggttcaacagct

SEQ ID NO: 30424 - DNA, 65 bp, Mus musculus
ctgcgcacaccacaatgagtgccctacctgaaactatgctcacagaaacacaaagaagatgggta

SEQ ID NO: 30425 - DNA, 65 bp, Mus musculus
agctgcccgctctcaaatggacagaactggcgggacttatcacacagtgcatggcgtatgatcct

SEQ ID NO: 30426 - DNA, 65 bp, Mus musculus
aaatatggctcggagaccagcgacttcaccgttagtgtgttcatcccagaggaggagttgaggaa

SEQ ID NO: 30427 - DNA, 65 bp, Mus musculus
agcagacaacactgtcctctatcccatcacacccgtctactgccgggaaaatcttccgtgctata

SEQ ID NO: 30428 - DNA, 65 bp, Mus musculus
agagccatcctggtttcacaggaaagcccagcagaatcggagaggattttcagaggagcaacttc

SEQ ID NO: 30429 - DNA, 65 bp, Mus musculus
tccagaagtggctcaaggacggcacggttctgtgcaagcttattaattcactgtatcctgagggg

SEQ ID NO: 30430 - DNA, 65 bp, Mus musculus
ctatgtaggttcttagccctgacagctctgaggtgtcactgggcaaagatgactgcacatgggca

SEQ ID NO: 30431 - DNA, 65 bp, Mus musculus
tgcttcagagaacccactgctcaggcagctgaagacagctggaaacgtcctaagtgacaaactat

SEQ ID NO: 30432 - DNA, 65 bp, Mus musculus
aacacagccacgtctgtctttgaccactgcctcttcggcagcacacgtacaatgtcttggtgaga

SEQ ID NO: 30433 - DNA, 65 bp, Mus musculus
tctgcgaaaccggatcaatgacaaccagaaagtctccaaaactcgtgggaaggccaaagtcaccg

SEQ ID NO: 30434 - DNA, 65 bp, Mus musculus
agaacgtggagatacaccagaccttggaccagacccttctggaactcaacaacctgtaagggctg

SEQ ID NO: 30435 - DNA, 65 bp, Mus musculus
aaccaagagttcaagactttggcgccttttctgaaccacttctggggcccaacccctccctagaa

SEQ ID NO: 30436 - DNA, 65 bp, Mus musculus; identical to SEQ ID NO: 23716

SEQ ID NO: 30437 - DNA, 65 bp, Mus musculus
aagaaatgccaagtcctggtcagcgacgttgattatcgcaattacctgcaccagtggacgtgcct

SEQ ID NO: 30438 - DNA, 65 bp, Mus musculus
aactacgacagcaccaacatgccgttgatgcaggcacagcagaacttgccacaccagactcagat

SEQ ID NO: 30439 - DNA, 65 bp, Mus musculus
tcaggctaggcacttcctggctaggacaatggaggagagctgctggcagtggctgctttgtagtt

SEQ ID NO: 30440 - DNA, 65 bp, Mus musculus
tgcgcctttcgcatagggcggtttttgccggagggtattgcgcgcggggtaggtgttcttttcgg

SEQ ID NO: 30441 - DNA, 65 bp, Mus musculus
atctttaccttgagtgagcctgatgtcaggttcctttacatactcagaccctgctacaggtgagg

SEQ ID NO: 30442 - DNA, 65 bp, Mus musculus
cgccaactacaggaacatcatccacacctacaacatgcttcctgatgccatgagctttgagttgg

SEQ ID NO: 30443 - DNA, 65 bp, Mus musculus
ctgcttactctgttgctggcttacatcatgtgctttcggcgtgaaggacggctgaagagagacat

SEQ ID NO: 30444 - DNA, 65 bp, Mus musculus
atacctggctctgctccacatgggctgctggagagctcttccttttgaggttcctctcaattcca

SEQ ID NO: 30445 - DNA, 65 bp, Mus musculus
aaggaaaaagacagcaactgacaggttcaacatattacacataagcatctaagtccaatacctta

SEQ ID NO: 30446 - DNA, 65 bp, Mus musculus
ccatttgcagtcatgaacggtgtcttcatatttcctggtgactacctcagaactgacactgcgtg

SEQ ID NO: 30447 - DNA, 65 bp, Mus musculus
tgcaggctcaaaccccaatgcgatttatcaggtgctttgagagatcgactgcagcagcagagggc

SEQ ID NO: 30448 - DNA, 65 bp, Mus musculus
taaaagctccgtgtccagcttggattgcttgtccagcattgtggatcggatcacgtctacagagc

SEQ ID NO: 30449 - DNA, 65 bp, Mus musculus
tggaggaggtggtggagaagtaactcagccagcatttggaacattcttcacccagcaggaagacc

SEQ ID NO: 30450 - DNA, 65 bp, Mus musculus
aaccacaaatctgctctctctagggtttgatcaacaagcaggaacatcttgctgtgttggctgtg

SEQ ID NO: 30451 - DNA, 65 bp, Mus musculus
cagaaaacagccctgggctgccacaagccagactccccactccccattcacataaggctaacacc

SEQ ID NO: 30452 - DNA, 65 bp, Mus musculus
ataagtcaaaggacaacgccccgatatctcctgcctgcttggtactgagtgctcatgtgggccac

SEQ ID NO: 30453 - DNA, 65 bp, Mus musculus
actggcaccagctagaaaatctctccaacttcatcaaggccatggtcagctacggcatgaaccct

SEQ ID NO: 30454 - DNA, 65 bp, Mus musculus
cccctcaccaggatcaaggtttagtgactgactgggatgatttaggagctcaacattgtacttcc

SEQ ID NO: 30455 - DNA, 65 bp, Mus musculus
gtaggccctcagtgaccgccttagaatctcagagaccaggatatggttgaccgtgtggtgtcact

SEQ ID NO: 30456 - DNA, 65 bp, Mus musculus
cgtacccacttaatgccttgcaccatccccttcccgagtggtaaatggaaaggccggacgatcgc

SEQ ID NO: 30457 - DNA, 65 bp, Mus musculus
gagtcaagtatgcagagaaacaagagcggagatttgagccggagaagttgagagaaggcaggaac

SEQ ID NO: 30458 - DNA, 65 bp, Mus musculus
aaatgtgccgagcttgaagaagaattgaaaacggtgacgaacaacttgaagtcactggaggctca

SEQ ID NO: 30459 - DNA, 65 bp, Mus musculus
tctgcgccaatgggaggttattcctgtcccaggcaggaactggttctacctgtcagataaacaca

SEQ ID NO: 30460 - DNA, 65 bp, Mus musculus
ccacgaagggtttcctcctgcctggcatttgataccattacctttaggagacatctgtctagtcg

SEQ ID NO: 30461 - DNA, 65 bp, Mus musculus
acacccaaatgactgctgaagggcatccaggattatgtgcacctctgcatctcccatcatgccat

SEQ ID NO: 30462 - DNA, 65 bp, Mus musculus
tggaaataagtgcggggcctgcgggagaaccgtgtaccacgcggaagaggtgcagtgcgatgggc

SEQ ID NO: 30463 - DNA, 65 bp, Mus musculus
tttgaaactctgatgagttaagtcatgctctgggagctgtgagccccatgctcagatccactggg

SEQ ID NO: 30464 - DNA, 65 bp, Mus musculus
agaactgccccttggaactgtacaacctcatgcgcctgtgttggagcaagctgcctgctgataga

SEQ ID NO: 30465 - DNA, 65 bp, Mus musculus
gtggtttgactctggtgaatacccttctggtccttcctcgccatcactctcagacaatctgggat

SEQ ID NO: 30466 - DNA, 65 bp, Mus musculus
agaagaaaccacagcgagaggaaacagggaaaacctccccaagccttacttctcagataaagagt

SEQ ID NO: 30467 - DNA, 65 bp, Mus musculus
ccaagccttgtccgcattcttcaaccacaagttctacagaagcacatttgtctcctacccaaagc

SEQ ID NO: 30468 - DNA, 65 bp, Mus musculus
ccccgtgaagaaaatcagaatcaaatccagatcccaaatcaaaggccacctccttcagggttcca

SEQ ID NO: 30469 - DNA, 65 bp, Mus musculus
cgaccagcagcttacctacttactaacagctgacatcactggtgagcatacaccataccaggagc

SEQ ID NO: 30470 - DNA, 65 bp, Mus musculus
tccgtgacagaaatgaataggacaatggctccctcagaaagttctcccatggccacaaaggatta

SEQ ID NO: 30471 - DNA, 65 bp, Mus musculus
gtactgattacttcctgggtgcctgaacatattccaaagtaacactgctacacaagctgtgtgtg

SEQ ID NO: 30472 - DNA, 65 bp, Mus musculus
cgatgatgaggacacttgccaagctggatgtactgaagatgatgaaaccagtcacagtgacagag

SEQ ID NO: 30473 - DNA, 65 bp, Mus musculus
acaaagtggcttctgctgactatcatcgcaaagccctgtgaaggtctactgaccgctcactattg

SEQ ID NO: 30474 - DNA, 65 bp, Mus musculus
tactgctaacaactcagaggacgcatcccaagactttgggccacaagcattccagctactgtctg

SEQ ID NO: 30475 - DNA, 65 bp, Mus musculus
gatttccctgtgcttggctctccaaatttctgcccatccatcctgcccctcacacagtagtacta

SEQ ID NO: 30476 - DNA, 65 bp, Mus musculus
cactgaacaagaaatccaagaagatcagcagaaaagaagccgagaagcggaagaggtcttccaag

SEQ ID NO: 30477 - DNA, 65 bp, Mus musculus
acaaagctcctttcttgggtgaccaacatcttcctgtctttgagcaaccaaggccagcatgcgag

SEQ ID NO: 30478 - DNA, 65 bp, Mus musculus
ccttgtgtctgctgaaatggagactgtgcactctacatttctcctgctactcttcgtgcctctga

SEQ ID NO: 30479 - DNA, 65 bp, Mus musculus
ggagattgatgaagatgcattccgaaagctgcctcacctccaagagctggttctgcgtgacaata

SEQ ID NO: 30480 - DNA, 65 bp, Mus musculus
agctgctgccaggcctaagacaggctttaaggcccagaatgccaccacaaaggggccaaatgatt

SEQ ID NO: 30481 - DNA, 65 bp, Mus musculus
acgaaagggcgaagaagcgacgaccgcaacaagacgcaacacgacatctgaagcacaaaagcaca

SEQ ID NO: 30482 - DNA, 65 bp, Mus musculus
atggggttcgaaaccgccagaagaaccggtcgtggaagtacaatcagagcatatccctgcgtagg

SEQ ID NO: 30483 - DNA, 65 bp, Mus musculus
ggcccagagaacaatgggaaccagtgtttcaagatgggaagatggctttactggcctcaaatagc

SEQ ID NO: 30484 - DNA, 65 bp, Mus musculus
gggaacctccttcctgttgctgtaggtagtcactcctcactaatgcaccatgcacttcatgagtt

SEQ ID NO: 30485 - DNA, 65 bp, Mus musculus
accacacaccgcaccaccacacgcagacacccacgatcaaccaacacatcatcacgaacccacag

SEQ ID NO: 30486 - DNA, 65 bp, Mus musculus
cttcccgggtcagcgttccagctggatacaatttgggaggacgatggcaacctacgctcttcaaa

SEQ ID NO: 30487 - DNA, 65 bp, Mus musculus
taccagtgcgatagctgctgcaagacctttgtgcgctccgaccatctgcacagacacctcaagaa

SEQ ID NO: 30488 - DNA, 65 bp, Mus musculus
aggagaacaaagatgcggtattcaagtggttcacagagaacagcagttagttcctggttctgaga

SEQ ID NO: 30489 - DNA, 65 bp, Mus musculus
tcgacctttccaatggccacctggacaccttccacctctctctggctcgattctgggagcagtcg

SEQ ID NO: 30490 - DNA, 65 bp, Mus musculus
tccttactctctcgggattattgcctaacgctgaggtgctgattgtgggagccaaccaagatcag

SEQ ID NO: 30491 - DNA, 65 bp, Mus musculus
gccccgtgtctgggattgagatcttacaacaaaacctcatggacatcagatggccgatgtgtaag

SEQ ID NO: 30492 - DNA, 65 bp, Mus musculus
ctacctgtgtggaagataggaactccaagtctcgtctggtgctcatctctggcatcatctttgtc

SEQ ID NO: 30493 - DNA, 65 bp, Mus musculus
tagtgatgatgctgtgctctgccatccatccagacagaaaccagccccaacgcctccagttctgt

SEQ ID NO: 30494 - DNA, 65 bp, Mus musculus
cgtgggtggaacgctcagatttcatcggtgaagtaggcaccaaactgccgcgaacagttcctact

SEQ ID NO: 30495 - DNA, 65 bp, Mus musculus
gctggcttcgttaattctgtgactactgtctaattggccttaggatgcaggaatagcgttttgag

SEQ ID NO: 30496 - DNA, 65 bp, Mus musculus
ttgctgtgttgctcctgcccaccgcgcgacaagtatgcacccaccaagatcctctattctgcgcc

SEQ ID NO: 30497 - DNA, 65 bp, Mus musculus
gccctcccttgccctttacagtggagttctacagaggacatgattctggggatacttgtctgctt

SEQ ID NO: 30498 - DNA, 65 bp, Mus musculus
gaccggactctgggctaccagtatgaccctgaacagctggacttggctgagaacatggtttctca

SEQ ID NO: 30499 - DNA, 65 bp, Mus musculus
cccagatctcatgggagaagatacatggcaaaagtacacagactgttgcagttcatcatcctcag

SEQ ID NO: 30500 - DNA, 65 bp, Mus musculus
ccagggctctcagctgcttgtccactctgtggatcgaatggtcaacactaccttcatctgtacag

SEQ ID NO: 30501 - DNA, 65 bp, Mus musculus
agcaggcacctccctgctggtgacacagaacgggcatggtggcttgcgcagtcagctggaggctg

SEQ ID NO: 30502 - DNA, 65 bp, Mus musculus
ttacatggaaggcagtagcatggtgatctgtagtgctaataactcttgggagccatctatcccaa

SEQ ID NO: 30503 - DNA, 65 bp, Mus musculus
gtacatacttcactcatgaagccaaaggagccgatgacgcagcagacgcagacacagctataatc

SEQ ID NO: 30504 - DNA, 65 bp, Mus musculus
tcatctgaaatcaacctggagagccagatcacctgtggtatatggactcccgatgaccagcaggt

SEQ ID NO: 30505 - DNA, 65 bp, Mus musculus
gaacctactgctacatcatgaagatggctccagagagcatccctagtcttgaggctttcgctaga

SEQ ID NO: 30506 - DNA, 65 bp, Mus musculus
ggggacttggcaggtccaacgtcggaaatggaagctgaaacttattgcagaattagagtctcgag

SEQ ID NO: 30507 - DNA, 65 bp, Mus musculus
tcatgtaagaggttctgacagcaccttccgtgtcccctttctgctcgaaggatgaggataccttg

SEQ ID NO: 30508 - DNA, 65 bp, Mus musculus
gaccatgtactggatcaatcccactctaatagcagtttcagaattacaggactttgaggaggacg

SEQ ID NO: 30509 - DNA, 65 bp, Mus musculus
ctcaggcatctgttgcactgagggagctttgccgtatagtgatggagatttcccagaagcctcag

SEQ ID NO: 30510 - DNA, 65 bp, Mus musculus
aagctcagagaagcttgcgcaggtaacgtgttcccaggctgaggaatgacagagagatggtcaat

SEQ ID NO: 30511 - DNA, 65 bp, Mus musculus
cttcacaaggaccgtcctatagagcctctggacctggctgtgttctgggtggaatacgtgatgag

SEQ ID NO: 30512 - DNA, 65 bp, Mus musculus
gctgaatccttcccagggtaaagtggggacaaagttagcctttaactcacagggagattagccag

SEQ ID NO: 30513 - DNA, 65 bp, Mus musculus
tacagtggctttccggtggtagtgtcccgagagtcgcaaagacttgtaggctttgttcttcgaag

SEQ ID NO: 30514 - DNA, 65 bp, Mus musculus
tattttaccgacaaattcttggagatgtgctcctgagagacaggacaaacctgcaaagtgccgat

SEQ ID NO: 30515 - DNA, 65 bp, Mus musculus
tgttcctcaggcaccatccatcacctttttacatttgtggcagggttcctctggcctggaacttg

SEQ ID NO: 30516 - DNA, 65 bp, Mus musculus
cttctgaaatcaggagccatgattttggatgcctgggaaagccctctggacgatctagtgagtga

SEQ ID NO: 30517 - DNA, 65 bp, Mus musculus
cctataccaacgtgtgattgtggtgtcacacaacgcccatgatcttgcttcaaaagccttcatgg

SEQ ID NO: 30518 - DNA, 65 bp, Mus musculus
gagcaatggactcctggagggagttaagagcattctcatccaaatgcaaaatggagatacagaag

SEQ ID NO: 30519 - DNA, 65 bp, Mus musculus
cggaagttcttctgaacctgatcctcagtttggtgcagtcctcgagtgaccctctgtttcaacta

SEQ ID NO: 30520 - DNA, 65 bp, Mus musculus
gcaaagtccttattagtggtatttgctactaagatggcccacaatgaatgaaccagctcttcagt

SEQ ID NO: 30521 - DNA, 65 bp, Mus musculus
taacagtgccacccagaaagctgaaaccctccataatcttgctgaccaattatatgtagaacttt

SEQ ID NO: 30522 - DNA, 65 bp, Mus musculus
acagacagaacacttcccctgtgtcatactgcttccatccatactccagagaatcgagaggaagt

SEQ ID NO: 30523 - DNA, 65 bp, Mus musculus
gcagcaggagttactgactaagaacctcacctactgccacaaatactccatcaaagttcccgaag

SEQ ID NO: 30524 - DNA, 65 bp, Mus musculus
ggtcaaggctctcacctgctgccacaattattccatcaaaactccagaaaacctggacgaagctc

SEQ ID NO: 30525 - DNA, 65 bp, Mus musculus
tcagctggacaatttgaaacacttgtttcacgcatgtatagacgtgatgaggaggttctcagagc

SEQ ID NO: 30526 - DNA, 65 bp, Mus musculus
gatatcccgtgtggaatgaactggcatccttgcagtcacctgatgaagaccttcgccatcttaca

SEQ ID NO: 30527 - DNA, 65 bp, Mus musculus
gactacacaacctttgggaacacgtggaatcaggcaatccagttatcccagagcatgaatcaccg

SEQ ID NO: 30528 - DNA, 65 bp, Mus musculus
gcttgaacaatgatgcacagaaggtttctgatttcatcagtatcctgagagaccaaattgtgcct

SEQ ID NO: 30529 - DNA, 65 bp, Mus musculus
tctgacagtctctgccctgctcaatccctcctaaggccagaacatctccctgggagtcaaatgtt

SEQ ID NO: 30530 - DNA, 65 bp, Mus musculus
cttgacctgcagtgccagctcaagtataagttacatgttctggtatcaccagaggccaggatcct

SEQ ID NO: 30531 - DNA, 65 bp, Mus musculus
tataggcacccgacatagactgctgaacgcgtgctgtattcacactgaaacagaactataaaatc

SEQ ID NO: 30532 - DNA, 65 bp, Mus musculus; identical to SEQ ID NO: 23716

SEQ ID NO: 30533 - DNA, 65 bp, Mus musculus
gaggaagcggggtcgctcccaggtttagtgacagtgggtctgggagagacatcatcctccacatc

SEQ ID NO: 30534 - DNA, 65 bp, Mus musculus
gccgtggatctgagaaagggtcacatagctctgccaatcgggacactcacttaacggaaattgtt

SEQ ID NO: 30535 - DNA, 65 bp, Mus musculus
aaacgggaaaatcctggacctggatacggcctcgtacaagcacagtgacatcacctcccactcct

SEQ ID NO: 30536 - DNA, 65 bp, Mus musculus
ctcaaaaatgcggacatggctacatatttctgtgcaagagcccagggatttgggtactttgacta

SEQ ID NO: 30537 - DNA, 65 bp, Mus musculus
cgtctctatcatatgcaacatgcagtctgtggggctcaatagcactgctttgaagatcgctctgg

SEQ ID NO: 30538 - DNA, 65 bp, Mus musculus
gaatcccagcaataaccgatactctgacaactcaaggaatacgtgcaaggggatctaatgtgcaa

SEQ ID NO: 30539 - DNA, 65 bp, Mus musculus
tgacatccccgacagattctcagctaccgtggatgcagcccacaacgcctgtatcctcaccatca

SEQ ID NO: 30540 - DNA, 65 bp, Mus musculus
gcacagacgaagacaaattcaccgaggtcttgtgtctacggagcttcccgcagctgaaactaaca

SEQ ID NO: 30541 - DNA, 65 bp, Mus musculus
gaggccttgagtggattggaaggattgatcctaatagaggtggtactaagtacagtgagaagttc

SEQ ID NO: 30542 - DNA, 65 bp, Mus musculus
ccatccaccttcattatgtgatcccacatccatccactgcaccatgtgaccatacatataccttt

SEQ ID NO: 30543 - DNA, 65 bp, Mus musculus
ctgttcttcctggattgatcgtttcaggggtgcatcagacgcttcgttgccattggagaaattgg

SEQ ID NO: 30544 - DNA, 65 bp, Mus musculus
cgccgcagatgctggacactgacgcatacacttatgttcccaaacacagagaattcctcaagaga

SEQ ID NO: 30545 - DNA, 65 bp, Mus musculus
aagcagacacctgtgcatggcctggaatggattggagctattgatcctgaaactggtggtgctgc

SEQ ID NO: 30546 - DNA, 65 bp, Mus musculus
caactgggtccaagaaaaacagatcatttattcactggtctaataggtggtaacttcaaccgagc

SEQ ID NO: 30547 - DNA, 65 bp, Mus musculus
ctcacaaattcatgtccacatcagtcggagacagggtcaccatcacctgcaaggccagtcaggat

SEQ ID NO: 30548 - DNA, 65 bp, Mus musculus
ataccctgagaactgaggacagtgccacttattactgtgcaaggggggattacgtcggggcctgg

SEQ ID NO: 30549 - DNA, 65 bp, Mus musculus
tagaaacctctacagaaactgccttaacaaacgagtgggaaaagaggctctctacatctcccgtg

SEQ ID NO: 30550 - DNA, 65 bp, Mus musculus
tagcctctcctcactcattttcaacgctgaccctgacaggatccacagacttctccaggaccttc

SEQ ID NO: 30551 - DNA, 65 bp, Mus musculus
agacaattgactcatcatcagacgctgctgcagacccctttgcaagcctggagaacaagggccaa

SEQ ID NO: 30552 - DNA, 65 bp, Mus musculus
gtgtctacaagtctgcaggaaccacagattatgtgggcagactgctttgaaactggattgaaagt

SEQ ID NO: 30553 - DNA, 65 bp, Mus musculus
tccttcttctgcgagctctggacttcggtagatgtgctgtgtgtgacggccagcattgagaccct

SEQ ID NO: 30554 - DNA, 65 bp, Mus musculus
ttcatcatcccggttctgatcatctctgtctgctacagcctcatgattcgacgacttcgtggtgt

SEQ ID NO: 30555 - DNA, 65 bp, Mus musculus
gttaagaggatccgatagcctatctctgataattctgtgtggaagcccccactgcaacactctaa

SEQ ID NO: 30556 - DNA, 65 bp, Mus musculus
acaacacgtacccctttctgctcacgtttcctgactacctaccctgttcagtgatgttgcagcca

SEQ ID NO: 30557 - DNA, 65 bp, Mus musculus
gtgcctcatccaagctttccttgttctcttatggaagctcccctgcacaccagagcactttaaag

SEQ ID NO: 30558 - DNA, 65 bp, Mus musculus
aacagcgttgccactgacagctggagcatctggaagttgcagaaagccatctctgtcttggagat

SEQ ID NO: 30559 - DNA, 65 bp, Mus musculus
ctccaggcttgtacagtcgcatagactctgttctcttctgtcagctttcaaagggctgttcctct

SEQ ID NO: 30560 - DNA, 65 bp, Mus musculus
ctcacagagctggaactccaagcctggccccaaagaccctccatcacgaagagcactttacagat

SEQ ID NO: 30561 - DNA, 65 bp, Mus musculus
tatgctcctggagagaacgtcccgagctgtagcggtggaaattgctctcaaggaagtggtatttt

SEQ ID NO: 30562 - DNA, 65 bp, Mus musculus
agaacaagaccctggagagtctcatcgagctccataacaagccgcccatctggaatgaagacagt

SEQ ID NO: 30563 - DNA, 65 bp, Mus musculus
aggcctctacacgtcagtggtggtgaagtatacagacaacatcatgaaaggcttctctgctgccg

SEQ ID NO: 30564 - DNA, 65 bp, Mus musculus
aggtgtcctggaacccagctgtctcgttggaaaccaccaaggttgagaacagatgagggcgacag

SEQ ID NO: 30565 - DNA, 65 bp, Mus musculus
agagaacaaacaccctcctctggcctttgtacccacgtgcacataaccgcaaacagacacaccca

SEQ ID NO: 30566 - DNA, 65 bp, Mus musculus
aagatctgcctgttcgaaggggccaacttcaagggcaacaccatggagatccaagaggatgatgt

SEQ ID NO: 30567 - DNA, 65 bp, Mus musculus
ccatccccatacatcccagtttccccttgctttcctagaggatgatgtgactctcagacatctgt

SEQ ID NO: 30568 - DNA, 65 bp, Mus musculus
gggcagcacatcttagaagctaaatagttccctgcctttctcagccagtaattccacattcaggt

SEQ ID NO: 30569 - DNA, 65 bp, Mus musculus
cctctcccagttgctgcagtctgggctatggctgccaggatcagaatggcctcacctcatttatc

SEQ ID NO: 30570 - DNA, 65 bp, Mus musculus
atacctgtgtgtcctccccgccattccatgcccaacggggttttggatacttacctgccttttca

SEQ ID NO: 30571 - DNA, 65 bp, Mus musculus
aagtacgccaagtggaagccctggctgaagccgtacctggctgtctgcatcttctttaacgtcat

SEQ ID NO: 30572 - DNA, 65 bp, Mus musculus
ctccattgggacagtgctcagcgtccctggaaacgcagctgtagatctccttaagcaagaagtaa

SEQ ID NO: 30573 - DNA, 65 bp, Mus musculus
tggtgagcagaggagtactaacggtgaaacaattcaactgaagacccaagttttcaggagctacc

SEQ ID NO: 30574 - DNA, 65 bp, Mus musculus
tttcctgaagcccacctagggcatgcactaaatgccaagtacgctcctgtaatgcaccaggtact

SEQ ID NO: 30575 - DNA, 65 bp, Mus musculus
agcctgttcccggaagtgcatctgcttgtctcgggcgagatggcttcaaggttacttcgcggagt

SEQ ID NO: 30576 - DNA, 65 bp, Mus musculus
tatgagctaccgggccagctctgtactgagactcacggtctttgtgggagcctataccttctgaa

SEQ ID NO: 30577 - DNA, 65 bp, Mus musculus
ggcagacactacgagactcaatgcttaagtacccagatagtcaccaacccaggatctttgagggg

SEQ ID NO: 30578 - DNA, 65 bp, Mus musculus
caaactgggtcccaatgaacaatataagttctactctgtgaatgtggactacagcaaactgaaga

SEQ ID NO: 30579 - DNA, 65 bp, Mus musculus
atgcagtgaagcagactccagctgaaacgcaagaggttgaaaactcagatcatcccacagatccg

SEQ ID NO: 30580 - DNA, 65 bp, Mus musculus
gtggtctgcaagccctttggcaatgtgagatttgatgctaagctggccactgtgggaatcgtctt

SEQ ID NO: 30581 - DNA, 65 bp, Mus musculus
tgccaacctcacctagcagtgcctgagccaagtactctaccaatggatatgcctcagagctcatt

SEQ ID NO: 30582 - DNA, 65 bp, Mus musculus
tgggactgtgttggtggagaatgtctgtaggtgaaaatgcagccctgtgagtttgcaacccaggt

SEQ ID NO: 30583 - DNA, 65 bp, Mus musculus
cccatccttcagacatgctgtacactactgggtgactgggaaaccagaaatgctacttgagtaca

SEQ ID NO: 30584 - DNA, 65 bp, Mus musculus
tttcatacctgccagtcatttttaagaccagacacttaactgtagcagacattgacaatggccat

SEQ ID NO: 30585 - DNA, 65 bp, Mus musculus
gtcatccaagaacttcgtaagtgttgtgctcgatatcccaaaggaagatctcttgtctgctcagg

SEQ ID NO: 30586 - DNA, 65 bp, Mus musculus
ggctgcacagataccggaatctgaccagataaaacagtttaaggagttcctgggaacctacaata

SEQ ID NO: 30587 - DNA, 65 bp, Mus musculus
atagcgccatcgacagcgggatcaacctgacgaccgacacgagcaaatcagctacctcttcaagt

SEQ ID NO: 30588 - DNA, 65 bp, Mus musculus
accacctcctcagcatctccctgtctggatacatcaactacctggacaagaacaaccccagcaaa

SEQ ID NO: 30589 - DNA, 65 bp, Mus musculus
aggtgacccgaaggctcaccacttccttgctcctggtagaaatgccttatgcaaagcgaacagat

SEQ ID NO: 30590 - DNA, 65 bp, Mus musculus
tgttcaaccctttcccagggtaacaaggagcccagtttcccctttgtgcgatctatgacgttcga

SEQ ID NO: 30591 - DNA, 65 bp, Mus musculus
agtgccttcaacatagctgtctcttgcctgccactgtgtgaatctggcagctgagtatctcaggc

SEQ ID NO: 30592 - DNA, 65 bp, Mus musculus
atggaacagtcaaaggtcaaaggccagagccctgctgttgtggaggtagcagagagtttgaagca

SEQ ID NO: 30593 - DNA, 65 bp, Mus musculus
tgcttttggagggtatggagaacgtcttgattctggttttccgatggctctatggatgtggcccc

SEQ ID NO: 30594 - DNA, 65 bp, Mus musculus
cccacttggtggtagtgtttctcttctatggctctgcgatctatgggtatctgcttccagctaag

SEQ ID NO: 30595 - DNA, 65 bp, Mus musculus
ccctgttgtctacagcctcaggaacaaagaagtcaaagatgctctatgcagagctgtgggcagaa

SEQ ID NO: 30596 - DNA, 65 bp, Mus musculus
cgaatagcagagctgtctggtaacctgcctctgactgttatcatgcacaccattttccaggaacg

SEQ ID NO: 30597 - DNA, 65 bp, Mus musculus
ggactgtttctgctcatgtttgtggtcgctgtgcttgggaatcttctcatcattctggccgtcag

SEQ ID NO: 30598 - DNA, 65 bp, Mus musculus
gattgtatctgcatttttcacggccataacccctctgctgaaccccataatctacacctttagga

SEQ ID NO: 30599 - DNA, 65 bp, Mus musculus
ccagccttcctgaggacaaggttgtgtctgtgtttttcactgctgttacccctctactgaatccc

SEQ ID NO: 30600 - DNA, 65 bp, Mus musculus
cagatagcagcttctccatcgacaaggtggtatcggttttctacacagtggtcacccctttgttg

SEQ ID NO: 30601 - DNA, 65 bp, Mus musculus
tttttcatgctgggtctctcccagaacccccaggtgcagaggatgttgtttgggctttttctgct

SEQ ID NO: 30602 - DNA, 65 bp, Mus musculus
gttttggaaagcacctgcctcacattgttcatgccctggttgcgtatgtgtaccttgtggtgcct

SEQ ID NO: 30603 - DNA, 65 bp, Mus musculus
gtcatagccctagtctgtgctgatacatccctatttgaactggaggctctaacagccactgtcct

SEQ ID NO: 30604 - DNA, 65 bp, Mus musculus
gtgtggatatttcccatttcttctgtgatccgtctcaacttctcaaccttgcctgttctgatacc

SEQ ID NO: 30605 - DNA, 65 bp, Mus musculus
tcctgctctgacacccatgttaatgaggtggtgatatttatcataggagggcttggtgtcgtact

SEQ ID NO: 30606 - DNA, 65 bp, Mus musculus
cagtgctgatttcctggattaacttccgtggtattccaagttgcacactctactccttggctagg

SEQ ID NO: 30607 - DNA, 65 bp, Mus musculus
ggccagagatccagagacttctctttgtggtcttcttggttatctatgcagtcacagtttgtggc

SEQ ID NO: 30608 - DNA, 65 bp, Mus musculus
tagtggaagaaatgggcattgaggaagagaatgtacagcgtatcatggacacggacaactgtcca

SEQ ID NO: 30609 - DNA, 65 bp, Mus musculus
atattgtgggctttacccagctgtcctctgcttgcagtgcccaggagctcgtgaagttactcaac

SEQ ID NO: 30610 - DNA, 65 bp, Mus musculus
gagggttcaacaccttggtgcctactctagctgttgctatctcctatgtcttcatcttctgcagc

SEQ ID NO: 30611 - DNA, 65 bp, Mus musculus
cactgttccacagatgctggtaaacattcacacacaaagcaaggccatcacctatgcaggctgca

SEQ ID NO: 30612 - DNA, 65 bp, Mus musculus
gacagcttatcaagccacctcataatgcatcttgtacctgttctattgggagccatttccttcag

SEQ ID NO: 30613 - DNA, 65 bp, Mus musculus
cgcccttctgcacacagccagaaatcccacacttcttctgtgaacctaatcaggtgattcaactc

SEQ ID NO: 30614 - DNA, 65 bp, Mus musculus
ctgggcactgacaacattgtgtgccatgttgcgcactttgctcttaactaggttgtctttctgta

SEQ ID NO: 30615 - DNA, 65 bp, Mus musculus
agtagcccttttctatggtaccaccattggagtctatctgtgtccttcctctgtccgcacagctg

SEQ ID NO: 30616 - DNA, 65 bp, Mus musculus
tgtcagctcctggtcaggtggaattgctgtctctgtggttcaaacatctcttgcaatgaagctga

SEQ ID NO: 30617 - DNA, 65 bp, Mus musculus
cctttctctgtggttatctcatcctatgcgcggattctggccactgtctaccatatgagctctgt

SEQ ID NO: 30618 - DNA, 65 bp, Mus musculus
ccagctccagctactcatttagcagagacaaggtagtgtctgtcttctattcgctggtgattccc

SEQ ID NO: 30619 - DNA, 65 bp, Mus musculus
ctgctgttgctatcttctacggttctggtgcattcacatacttacagccgtcatcactgaattca

SEQ ID NO: 30620 - DNA, 65 bp, Mus musculus
gtttcctctggttccctgttcccatcatcatcatctcccaggtgtcgttctgtgggtctagaatt

SEQ ID NO: 30621 - DNA, 65 bp, Mus musculus
gtgcattactcagggctttcattcttgtatccccatccatactactcatcaaatgtcgccttaag

SEQ ID NO: 30622 - DNA, 65 bp, Mus musculus
agaattatcaggaactgcatctgcactaacatgtctgtttccaaactctcctgtgatgacatcac

SEQ ID NO: 30623 - DNA, 65 bp, Mus musculus
atatgctcctgttaggtgcctcctactcccgcatcatccatgctgccttcaggatctcatcaggt

SEQ ID NO: 30624 - DNA, 65 bp, Mus musculus
aaatcaacagcatcaaccagctcttcctggcttggacactcatggggagtgaccttgctttgatt

SEQ ID NO: 30625 - DNA, 65 bp, Mus musculus
ttacacccagacctgatacgcttgccctgtggagataccaccatcaacagcatgtatgggctgtt

SEQ ID NO: 30626 - DNA, 65 bp, Mus musculus
gcatcccaaagggaaagactcaaggtcctcagtacttgtgtctctcacatctgtgctgtgctcat

SEQ ID NO: 30627 - DNA, 65 bp, Mus musculus
acgaatttgcaagaccgagcacccagcaaaagatcacccatgtgcaaccaaccatccatcaacaa

SEQ ID NO: 30628 - DNA, 65 bp, Mus musculus; identical to SEQ ID NO: 23716

SEQ ID NO: 30629 - DNA, 65 bp, Mus musculus
agtaacggtatagaatggagcagtgaaaacgatcgcctcttggtctgccaggtgtgcatcaaatt

SEQ ID NO: 30630 - DNA, 65 bp, Mus musculus
taggcttagtgatgagggctggtctgtcaatcatgccaataatcattcgcctgcattggtttccc

SEQ ID NO: 30631 - DNA, 65 bp, Mus musculus
cttctttgccatctatatctctgtgcttctgggcaatggcacacttctctacctcatcaaggatg

SEQ ID NO: 30632 - DNA, 65 bp, Mus musculus
gtgctgggtgtcctggtgctaaaccagagggagattgtacatggggcctgtttcattcagtccta

SEQ ID NO: 30633 - DNA, 65 bp, Mus musculus
catcgctttggaggcaaaaccgttcctcgccacatccacatcctagtggccaacctctacgtggt

SEQ ID NO: 30634 - DNA, 65 bp, Mus musculus
ggcagtcacagacattgcccttagcacatgcattcttcccaaaatgttgggcatcttctggtttc

SEQ ID NO: 30635 - DNA, 65 bp, Mus musculus
caggactctcagctacatcctgctattgacactcttaatctgtttattcagttctttgcttttca

SEQ ID NO: 30636 - DNA, 65 bp, Mus musculus
cccttcattgatcaagatactcatgctgaacatggtcacatcatcatcgtgtgcaacatgggttc

SEQ ID NO: 30637 - DNA, 65 bp, Mus musculus
attacagtcgttattgcattcaaggccactgttccagctcaaatagtgagatggttaatggtatc

SEQ ID NO: 30638 - DNA, 65 bp, Mus musculus
aacttctctactagcactgaaatcccacatttcttttgtgaactcactgagcttctcagggtggg

SEQ ID NO: 30639 - DNA, 65 bp, Mus musculus
gaagagtggtgcaatgaagaggagccacttccccaaggtccaagtaatgaactcagaactaagac

SEQ ID NO: 30640 - DNA, 65 bp, Mus musculus
tacttccccgttcagtgcacacagggcttggctgggaatggtcaatcattcagcatagccttgat

SEQ ID NO: 30641 - DNA, 65 bp, Mus musculus
accatgtgtgtgttaccagtgtgtgccctttgcagccaatgcttgtgctggcttccaaagagaaa

SEQ ID NO: 30642 - DNA, 65 bp, Mus musculus
gctcctgggtatctggaagcatcactgccacagtgcagatatctttagcaatgacactgcccttc

SEQ ID NO: 30643 - DNA, 65 bp, Mus musculus
ctttgccaactcgctcctgcattccatcctggtctggcatctccccttctgtggtcattacatca

SEQ ID NO: 30644 - DNA, 65 bp, Mus musculus
tgtacatgaaacccaagagcaaggaagcccggatctcagaccaggtctttacagtcctctacgct

SEQ ID NO: 30645 - DNA, 65 bp, Mus musculus
atgactaggaggctgtgttgcattctggtatcctcatgctggctcattggatttcttgggtaccc

SEQ ID NO: 30646 - DNA, 65 bp, Mus musculus
tttagacttccttcccaggatgctaggcacaaggccctcaatacctgtggttctcacattggggt

SEQ ID NO: 30647 - DNA, 65 bp, Mus musculus
ccctgtggctggctgtgtggctcaactctgtattgtggtggcatttgggacatctgaatctttct

SEQ ID NO: 30648 - DNA, 65 bp, Mus musculus
ccatcctgggaagccagactcaaagctcttaatacctgtggttcccatgtgtgtgtgatcttggc

SEQ ID NO: 30649 - DNA, 65 bp, Mus musculus
caatgtcatcagtcatttctactgtgacagtcttcctttgttatctttggtctgctcaaatacac

SEQ ID NO: 30650 - DNA, 65 bp, Mus musculus
gcgtatgaccggtatgtggcgatgtgtcatccactccactaccccgtcattgtcagtagccggct

SEQ ID NO: 30651 - DNA, 65 bp, Mus musculus
actgcactaccctatcatcatgaacagcaaagtgtgccaccaactcgtcctcagctcctgggtga

SEQ ID NO: 30652 - DNA, 65 bp, Mus musculus
ccatttctactgtgatggtcctcctttgacagctctgctttgctcaaataaagaggaaagtgaac

SEQ ID NO: 30653 - DNA, 65 bp, Mus musculus
gcctctcacatcatggtggttgtcttgttctttggacctgccatcttcctctacttgagacctgc

SEQ ID NO: 30654 - DNA, 65 bp, Mus musculus
ctatgcacaaattgtgtcctccattctcaaggtcccgtctgctcgaggcatccgtaaagccttct

SEQ ID NO: 30655 - DNA, 65 bp, Mus musculus
tcgtcaatctcttctatgggccccttgtctacacctacatgttacctgcttcctatcactcgccg

SEQ ID NO: 30656 - DNA, 65 bp, Mus musculus
gacacaattctgaagatattgagaaccaggaatctcaactgcggaaacgctaccatcatcctgac

SEQ ID NO: 30657 - DNA, 65 bp, Mus musculus
ttgatgtggtcatgagtgaagagagcacaagtatttacaatgctgtgtacgctgtggctcacagc

SEQ ID NO: 30658 - DNA, 65 bp, Mus musculus
gtatactctcatcatgtcccagcgagtctgtgtacagttagtgattggcccttacagcataggct

SEQ ID NO: 30659 - DNA, 65 bp, Mus musculus
agggcctctaaggaccagggcaagttcctcaccctcttttacaccatcatcactccaagtctcaa

SEQ ID NO: 30660 - DNA, 65 bp, Mus musculus
cctgaccagttacagtctgaagcatgcattgataactgtgatgtacacggcagtgaccccaatgc

SEQ ID NO: 30661 - DNA, 65 bp, Mus musculus
gtccttcattgacttctgtcagtccacagtcgttacccctaaaatgctagtgaactttgtgacag

SEQ ID NO: 30662 - DNA, 65 bp, Mus musculus
gctacagtccagaaagaagcaaagttacctcagtgttatactcgatcgtcagcccaaccctcaac

SEQ ID NO: 30663 - DNA, 65 bp, Mus musculus
tccacagctctgtgggacctttgccgtgggtgtatggtccatctgcgcactaaatgcatctatca

SEQ ID NO: 30664 - DNA, 65 bp, Mus musculus
gagagtgtgtaccatcatggctgctgtttcctggatagtcagctttctcctgtctctggtccatt

SEQ ID NO: 30665 - DNA, 65 bp, Mus musculus
gctgctgctcctcgtccatgactcctaagatgctggctgactctctctctgtgcggaaaaccatt

SEQ ID NO: 30666 - DNA, 65 bp, Mus musculus
ctttagcagtggtggtcatcactgtaccattcatatgcatcctggtttcttatggccacatgggg

SEQ ID NO: 30667 - DNA, 65 bp, Mus musculus
cccctaccctatcctgaagctctcttgttctgacaccttcatcaatgacctgatggtcttcacca

SEQ ID NO: 30668 - DNA, 65 bp, Mus musculus
ctactgtgatgacatgcctcttctcaggctaacttgctcagatactcactacaagcagctgtcta

SEQ ID NO: 30669 - DNA, 65 bp, Mus musculus
ccggcacaagacattttccacatgtagctcacacttgtctgtggtcactctgttctatggcacag

SEQ ID NO: 30670 - DNA, 65 bp, Mus musculus
tttacctcaagcctaagggccccaagtctctggaaggagatactctgatgggcatcacctacaca

SEQ ID NO: 30671 - DNA, 65 bp, Mus musculus
atcgcgctcctagccatgacaaagttgtctcaatcttctacacagttcttactcctatgctcaac

SEQ ID NO: 30672 - DNA, 65 bp, Mus musculus
aggagtttacctcagttccacagtttctggttcttccagggaaagtatggtagcttcggtaatgt

SEQ ID NO: 30673 - DNA, 65 bp, Mus musculus
tagtgacagtctgttggacccttacaaccgttgtggccatgacacacaccttcctcatattccgg

SEQ ID NO: 30674 - DNA, 65 bp, Mus musculus
ccttctgctctcctgtagccccacatacgtaaacagcattatgactctaatagcagatgtcttct

SEQ ID NO: 30675 - DNA, 65 bp, Mus musculus
ttatgggtgcatcaactttgtgctaaccttgttatcctatggctgcatcattgccagtgttctgc

SEQ ID NO: 30676 - DNA, 65 bp, Mus musculus
agtcctccccagaagaggacaagaagttggctctgttctacaacgtcatctctgccttcctcaac

SEQ ID NO: 30677 - DNA, 65 bp, Mus musculus
tacctgatccccaaagagattcagctgcccacgaccatgacgaccttcgcagagatccagccgct

SEQ ID NO: 30678 - DNA, 65 bp, Mus musculus
tcaagccctgaaacttgaactcaacctcagcagcaatcttgatgcaaccagtccagtccaacagc

SEQ ID NO: 30679 - DNA, 65 bp, Mus musculus
ggtgtccctcacataccttcagagtcttatcacagcactgactgtctcttcctgtgtgttctctg

SEQ ID NO: 30680 - DNA, 65 bp, Mus musculus
atccctgatggaccagctgcaaggcgtggtcaccaactttggctctgggattccagacttccacg

SEQ ID NO: 30681 - DNA, 65 bp, Mus musculus
ttagttttggggtcttgggtcacaacagcattgaattccttgctgcagagttcaatggcactgcg

SEQ ID NO: 30682 - DNA, 65 bp, Mus musculus
gatgtctgaccattgatgccactgaactgtggcctccttcaggacacttgcagaaggtttgcaaa

SEQ ID NO: 30683 - DNA, 65 bp, Mus musculus
tcttctatggatctgggctccttgcttatgtcaagccatcatctgctgagactgtaggtcaagga

SEQ ID NO: 30684 - DNA, 65 bp, Mus musculus
taccgcctcgatttcatccagcagcagaagctgcagttcgatcactggaacgtggttctggacaa

SEQ ID NO: 30685 - DNA, 65 bp, Mus musculus
gctggtctctgtactctacgctgtcattgtaccattgctcaatcccatcatctactgcttgcgca

SEQ ID NO: 30686 - DNA, 65 bp, Mus musculus
tgtggtgtctctcttctacggcagctgtatcttcatgtatgtccggtctggcaagaatggacagg

SEQ ID NO: 30687 - DNA, 65 bp, Mus musculus
ggttgtggaacactgctgcaagggacgtctctcttaagtccactagcaaacgaggcagacattta

SEQ ID NO: 30688 - DNA, 65 bp, Mus musculus
cctccaccagcagctgtgcagagagagtctccctcagtcctaaatacagacccagatgcagaaaa

SEQ ID NO: 30689 - DNA, 65 bp, Mus musculus
actcgggcttccaagaactctggttttccccttggatgaatcttcatgtggatgaaccgtgggat

SEQ ID NO: 30690 - DNA, 65 bp, Mus musculus
tgctccgggatgagagtgcaggagtgattctagaggatgaagaaatggatggtgacaagctagct

SEQ ID NO: 30691 - DNA, 65 bp, Mus musculus
tcctccacaatcgaacagcaaaactctgctcgaatccgtcaaaacactagggaacacccctccac

SEQ ID NO: 30692 - DNA, 65 bp, Mus musculus
tggcactggacagttaaagaaccaggagcttggaagtggtggcaaacacagcaggcatctatatc

SEQ ID NO: 30693 - DNA, 65 bp, Mus musculus
ggtggaggacaacacagaaatcatccttgacccgcagaggatcaagatgaagtacctgaaaagct

SEQ ID NO: 30694 - DNA, 65 bp, Mus musculus
actgttgctcactagacttagccctagcgagaaattgccgtggagtgtctccccaaaccctcatt

SEQ ID NO: 30695 - DNA, 65 bp, Mus musculus
atcacctagagctgcacgagctggcccagtatggcatcatttagtcagatccctgctatgtgagc

SEQ ID NO: 30696 - DNA, 65 bp, Mus musculus
tatctagtacagccaacagatgtctagagccctgggtgtgaacatcgaccctctgactggcacct

SEQ ID NO: 30697 - DNA, 65 bp, Mus musculus
caagcctgtgacttctgtggctgacgcacccctgttggatctgtagttagtttgcagtagatgtt

SEQ ID NO: 30698 - DNA, 65 bp, Mus musculus
aaagtgggcacagaagtttgcaatggtggtccagcacccaagtcctcgacctgctgtatcctata

SEQ ID NO: 30699 - DNA, 65 bp, Mus musculus
ggctagatcgcataggcaagaagaactccatcttgctgcacaaggttcagcatgatctcagctca

SEQ ID NO: 30700 - DNA, 65 bp, Mus musculus
ccctccttggactcattcattacccacctctgtgtctgacctaatatccttggagtagtaggtta

SEQ ID NO: 30701 - DNA, 65 bp, Mus musculus
aattgaccaccagggttacatccaggtcacagatttcgggttcgccaaaagagtcaagggcagga

SEQ ID NO: 30702 - DNA, 65 bp, Mus musculus
gctttgtccaaaagcaataaaccaatccacacgatcatcctcaacccacacgttcacctggtagg

SEQ ID NO: 30703 - DNA, 65 bp, Mus musculus
tctgaacatgctgagtgtggaaggctggaagtacatcttgtgggaggcttcagtgatgacaggca

SEQ ID NO: 30704 - DNA, 65 bp, Mus musculus
accttccttcactctgaccactcagctcccagctccaagtgaggtctctcatttgcagctcctca

SEQ ID NO: 30705 - DNA, 65 bp, Mus musculus
gagaggatctcaagcaggaggaggaatgagttcctttaaaaccagggtcaagagccggatactca

SEQ ID NO: 30706 - DNA, 65 bp, Mus musculus
ttagaggagtcacctgacctgtgtggactgtgatgtcctgaagatgctgaccactctctagtcct

SEQ ID NO: 30707 - DNA, 65 bp, Mus musculus
cagatgaaaacagaggaagacttatcccaattcggacaacagcggcaatatggacaagagcgctc

SEQ ID NO: 30708 - DNA, 65 bp, Mus musculus
tcaatggtgaagatggggaagacagcaagagagcatctgcaggggagatagagcggtcttacttg

SEQ ID NO: 30709 - DNA, 65 bp, Mus musculus
aaccctctcatagacttcaaccagggctcaggtctcacgcattctttgcagagcctcaacatgtc

SEQ ID NO: 30710 - DNA, 65 bp, Mus musculus
tcttcggttaaggttgctgacaagctgctgaagtggtctgtccaaatcccagctgagcctgagtc

SEQ ID NO: 30711 - DNA, 65 bp, Mus musculus
gggtaataccctgacactggagtccagacgcaaccagctttaaccaatggaaaacggggttggcc

SEQ ID NO: 30712 - DNA, 65 bp, Mus musculus
gtgtgggctttggtttaaaggacataacctctccgcttgtgacaaagtcattgttgccatcagga

SEQ ID NO: 30713 - DNA, 65 bp, Mus musculus
gcaatgctgctagctgagattgccaatgtgacccatcgcaaagatggcagctcctgtcctattgt

SEQ ID NO: 30714 - DNA, 65 bp, Mus musculus
gctgcctctctgaccagtctgatcctaagggtagatagaagatggtctaagcctacgcttgttac

SEQ ID NO: 30715 - DNA, 65 bp, Mus musculus
gcatcacgttgagggagatgagccttgttcaagccttagaaaggacccttagtctacacaggtag

SEQ ID NO: 30716 - DNA, 65 bp, Mus musculus
gcactccagtttgagcttgttgttcatctgtgtaccatcctctaccatttaggggcattagtagc

SEQ ID NO: 30717 - DNA, 65 bp, Mus musculus
catcgagagcactcataggcgacatatgtagtgttttcggcttgagctaccactctgcatcatgc

SEQ ID NO: 30718 - DNA, 65 bp, Mus musculus
gtggaactaaacctgctccagtgtttcctcatcattgagtttgggctagctgtggatagcttgca

SEQ ID NO: 30719 - DNA, 65 bp, Mus musculus
aagccctatggacgccgtaacgaggtctggcttgtgaaggcatgagtcacttgatgaactgagaa

SEQ ID NO: 30720 - DNA, 65 bp, Mus musculus
tctattggcatctgtcccttcctgtgtggaagacctcagtcaccctgtggcagagcctggttcaa

SEQ ID NO: 30721 - DNA, 65 bp, Mus musculus
cccagcttcaggaactatacctcgcccacaaggatgtggaaggtcaagatgtagtggaaaccata

SEQ ID NO: 30722 - DNA, 65 bp, Mus musculus
ttcccaactggagtacagaggtaagggccaataaagaggacaggaggtggcttcccttcagcaga

SEQ ID NO: 30723 - DNA, 65 bp, Mus musculus
ttcctataacacacaaggagcagcttcttccctaggttcctatggggctcaagcagcctcctatg

SEQ ID NO: 30724 - DNA, 65 bp, Mus musculus; identical to SEQ ID NO: 23716

SEQ ID NO: 30725 - DNA, 65 bp, Mus musculus
aaataggcgttggcacttcgttttttccccgaatatgtactcctcacacaggctcccttgtgcgg

SEQ ID NO: 30726 - DNA, 65 bp, Mus musculus
gtacctagcagtcaccccacaagcctaccatcacgtccccttcagagctcaccttgtatccttaa

SEQ ID NO: 30727 - DNA, 65 bp, Mus musculus
ggcaaagaacttgagagagtcctgaagaaacttgtcccaatatgggatattccagggaatggtca

SEQ ID NO: 30728 - DNA, 65 bp, Mus musculus
ttctacacgtcccttgtgtatgaatgtaagggcctacagatccaattgatgggcaacctcgggag

SEQ ID NO: 30729 - DNA, 65 bp, Mus musculus
tggcaatctagcttctttggtttctatgatgccaatgagacagttctggagatggaggagcagcc

SEQ ID NO: 30730 - DNA, 65 bp, Mus musculus
cttttacatggtccctggcatgctagaacccttgctctgcgggaacagctctgacgccgggcaat

SEQ ID NO: 30731 - DNA, 65 bp, Mus musculus
ttcatcgccaaacccagcacagaaggagtcacgggaagaaaactggcaagagtggagacagaaag

SEQ ID NO: 30732 - DNA, 65 bp, Mus musculus
gggctggagtggtctcctctcaacagctttcatcacactattttccagctaaagatggcaaagct

SEQ ID NO: 30733 - DNA, 65 bp, Mus musculus
gctgataggaagattaaaattaagccaagatggggaggacattgtttgcctgtgtagacatctcc

SEQ ID NO: 30734 - DNA, 65 bp, Mus musculus
gactactttggggaactcaggggccaatacaaaactggtccctgtaaaaaagaagttgcccccca

SEQ ID NO: 30735 - DNA, 65 bp, Mus musculus
cctcagtcctaaacgtctgtgtggccaactcagcatctgcttccagaagtttcccacttgcagat

SEQ ID NO: 30736 - DNA, 65 bp, Mus musculus
ggcgtctcatctccctctgtacctgtcacttgctggctatgctgcagttattgcttgctgacctt

SEQ ID NO: 30737 - DNA, 65 bp, Mus musculus
ctcgtcaacgttcgtaagttagatgcaacatttgttgaacggcttgctacagctgggtttgttca

SEQ ID NO: 30738 - DNA, 65 bp, Mus musculus
gacagagagggtgtgatgggagcactgtgaggacagagagagtgtgattggagcactgtaatgaa

SEQ ID NO: 30739 - DNA, 65 bp, Mus musculus
gccgtgataatagccttggcaaaggtaggctgaagcacattaacaacgacgtatctgtgggagcc

SEQ ID NO: 30740 - DNA, 65 bp, Mus musculus
ctgctgtctgaaggcacagatgttggctgcacacctgggtgagttattcggcagaagactcggcc

SEQ ID NO: 30741 - DNA, 65 bp, Mus musculus
acaccatgggctcctgtttaaccctctagctcttgcctgtggagacatgagggctgcactccata

SEQ ID NO: 30742 - DNA, 65 bp, Mus musculus
gcgcgagcgttgtctatcatggtacacagactggaatgagcttgttcttaacctcagcttcactg

SEQ ID NO: 30743 - DNA, 65 bp, Mus musculus
tttaggataacccgaggaacacgaggttcggaaggcggtgtgcacgtccggggcagattaaagcc

SEQ ID NO: 30744 - DNA, 65 bp, Mus musculus
gctgctgtctccagtgctggtgtgcaatggtggttatagtacacacagactgatgagtttatgcc

SEQ ID NO: 30745 - DNA, 65 bp, Mus musculus
cagagcagaacagataatcagtgtgaacaagtctaaatgctaagcagataggctgctgtgttaca

SEQ ID NO: 30746 - DNA, 65 bp, Mus musculus
ggagcgtctgctctggaagctcctaccctgtggcgctgttggagcccggagcatcctgccccgga

SEQ ID NO: 30747 - DNA, 65 bp, Mus musculus
ttctcttcagctcagaccccatgttccatcctcttaggaactgttgctgctggaccatggcgttt

SEQ ID NO: 30748 - DNA, 65 bp, Mus musculus
gtctgttatcagctagtaggaacatagtgtcactcatggccctggagtagtggcttagaactgtg

SEQ ID NO: 30749 - DNA, 65 bp, Mus musculus
aacctacacactgtaatcacagcaggggatgaaagtcatcacagtacacggtgggttcaaggccg

SEQ ID NO: 30750 - DNA, 65 bp, Mus musculus
ctcatccccaacacataactcagacaccccaggacatgagatagatgacacactgctttggtcaa

SEQ ID NO: 30751 - DNA, 65 bp, Mus musculus
tattgccattgctttggcgctggctctgaccagggtgtgaccccttaatcttctctctgagctga

SEQ ID NO: 30752 - DNA, 65 bp, Mus musculus
ggagggcggtgttttaaagatgtagacttggaatttagggatgcagaacacgtgaaagttgcatg

SEQ ID NO: 30753 - DNA, 65 bp, Mus musculus
tgatttccacaagggccccaccacccaccccagaaggagtctgccatactaggcaaggtattcca

SEQ ID NO: 30754 - DNA, 65 bp, Mus musculus
aattccgcttgggggcctcgcagtgaacgagcaccggctcagcaacaaactgctggcctgggtgg

SEQ ID NO: 30755 - DNA, 65 bp, Mus musculus
aattctacacactggttgagtaaccaccatgaagaaaagaagagcaaagccaaacttcttaacca

SEQ ID NO: 30756 - DNA, 65 bp, Mus musculus
taagcaaatggcacacagcttttaactggtgatctggggtacagcacgcaggtgtacagcgaaaa

SEQ ID NO: 30757 - DNA, 65 bp, Mus musculus
cagttttagacaggtatatagtttttagcagcatatttatcagggacattgaggtatttaatagc

SEQ ID NO: 30758 - DNA, 65 bp, Mus musculus
attccaggcagacaaggagcagagtgaggctgaattacaaacggtccgagaggagaactgctgct

SEQ ID NO: 30759 - DNA, 65 bp, Mus musculus
agataaccttacaagatcagtatctgatagctgaccaaaaaatgcatcaaaaagggaatttatgg

SEQ ID NO: 30760 - DNA, 65 bp, Mus musculus
aattccgagagagaggagaggctgcgggaggcggcggccttgggggacattcgggaggtgcagaa

SEQ ID NO: 30761 - DNA, 65 bp, Mus musculus
agcaaggcttactatccgtctcctgacatccgaagagctcgtcgcaggtgtgtctaatggccctt

SEQ ID NO: 30762 - DNA, 65 bp, Mus musculus
ccctgagatccatactgtgactcccgtgtagcccttttcctgattttcctgacatgcctttaaat

SEQ ID NO: 30763 - DNA, 65 bp, Mus musculus
aattccgagtgactccgaacaggaagaggacgagaaaaattaccgtccgcaacccccgagtggga

SEQ ID NO: 30764 - DNA, 65 bp, Mus musculus
gtaagtcaacagccatggcagcaagcacctttacaagctgagcaatcacactggcccctaattga

SEQ ID NO: 30765 - DNA, 65 bp, Mus musculus
atcataactcccatcctgcgatgtcatcatatggaacatggccagtccagagtcagggcttggag

SEQ ID NO: 30766 - DNA, 65 bp, Mus musculus
agacatgaatagcacagctggaccagcaagcagaagcagacacagcttcaaatgcaggatgaagc

SEQ ID NO: 30767 - DNA, 65 bp, Mus musculus
tggaggatttcgaatcgcgctttgccgcagccacgccgaacaggaacctgtcaatggactttgat

SEQ ID NO: 30768 - DNA, 65 bp, Mus musculus
tgggtccagagatggcctactacaagagagctgcagtcgcctgacaccctggagtggtattctat

SEQ ID NO: 30769 - DNA, 65 bp, Mus musculus
gagggctttcgacatctgctcagtctattgggtataacctgctgtctcactggaagacatatcag

SEQ ID NO: 30770 - DNA, 65 bp, Mus musculus
tttgccattcactcctcttctcctcttgctcctggagaagtaagcaataaagcttttgccgccgg

SEQ ID NO: 30771 - DNA, 65 bp, Mus musculus
atgaggcttttctggtgaacagtaatccagtgggttgttttcagcagcgtttattgaaatatata

SEQ ID NO: 30772 - DNA, 65 bp, Mus musculus
atttcctaaggtccagcgtgcgaccccagagcaagaggcccaggaaggacgcaccctgtgctttg

SEQ ID NO: 30773 - DNA, 65 bp, Mus musculus
tgaaaggctgggacaaggggagtgagcaactggtcagaatgcagaaagtcaggctgccttcctga

SEQ ID NO: 30774 - DNA, 65 bp, Mus musculus
gcactatcctttacagtcaaactactcgaaccgcattggtgatgagtgtggatcacacgtggtat

SEQ ID NO: 30775 - DNA, 65 bp, Mus musculus
agaagccaggaaagtcctgccaaggccattggcggagttccctggtgtgtttgcagccatcgaga

SEQ ID NO: 30776 - DNA, 65 bp, Mus musculus
taagaagacccacacttctggcttggtgctgactctggcttccctgggctgctggctacaggcct

SEQ ID NO: 30777 - DNA, 65 bp, Mus musculus
cctcccgagaaggaagtgaggtgaaaactggggcagggcagttgtgtgtaggcatgagcagcaga

SEQ ID NO: 30778 - DNA, 65 bp, Mus musculus
ctggcataacacatgctgttggatgcttgagcacaggaaccgtgtatatccagcactcaactggc

SEQ ID NO: 30779 - DNA, 65 bp, Mus musculus
aggcagctgcagcaacacgaggaggagttgagggctcagaaggacagagagaagcgcaggatcag

SEQ ID NO: 30780 - DNA, 65 bp, Mus musculus
tgttgaaagatggtcagacatcatgtggccatgcaagacacttcatagaatagactcaaacctgc

SEQ ID NO: 30781 - DNA, 65 bp, Mus musculus
agggctgtaactatagtgaataggcctttcagtgactagcgagaggttctggatggcttcccagg

SEQ ID NO: 30782 - DNA, 65 bp, Mus musculus
ccagaccctgggttcagtgcccagattgtaactaagtctgtttcataatcatgcacccaaggttc

SEQ ID NO: 30783 - DNA, 65 bp, Mus musculus
ctaggtatagtttcttaaaacaacagatggacatttgtcagatgacctccaatggtggctcgttg

SEQ ID NO: 30784 - DNA, 65 bp, Mus musculus
ataagctggagggaagagcaataggacctggctgtcagcccaggcttctctagacttgttcctat

SEQ ID NO: 30785 - DNA, 65 bp, Mus musculus
gtataaaccaaccgcgtcctgctcactgccaacacggctggaccacagtcattacaacaaattct

SEQ ID NO: 30786 - DNA, 65 bp, Mus musculus
tgcaaaattaactccagactggatactcaggcagatcagcatctggaactcatggagctctcaca

SEQ ID NO: 30787 - DNA, 65 bp, Mus musculus
tcccatagtttaggccatgaggaggcaaactctgagtgcctaggcatgggagtacagtggtacag

SEQ ID NO: 30788 - DNA, 65 bp, Mus musculus
cagatgtgaatggaaggatgtgaaaagaagcagcacaggtcactgggagccatggacacagttag

SEQ ID NO: 30789 - DNA, 65 bp, Mus musculus
gtggcatgggagactttggtaagtgtaggccctaggatatctgtcccaccattttccctgtaaca

SEQ ID NO: 30790 - DNA, 65 bp, Mus musculus
tcctaaacaagacccacagcctgtgtcccagactgctctgcaaagaccggactcagggttaaagt

SEQ ID NO: 30791 - DNA, 65 bp, Mus musculus
tgtattcacagcactcatagatagcctggagcatgagcccaccagtcagccacaggttggacaca

SEQ ID NO: 30792 - DNA, 65 bp, Mus musculus
aacttttcccaataccccgccatgacgacttgaaatatagtcggcattggcaatttttgacagtc

SEQ ID NO: 30793 - DNA, 65 bp, Mus musculus
accctgcgtctctgcttcggaccttcggaatccgggacatcggctcaaaactaggaacgaatatg

SEQ ID NO: 30794 - DNA, 65 bp, Mus musculus
tagtacgacctgagaaatttacgagggaaaccgaaccaggatgtcaaggtgtggcctgtcctagg

SEQ ID NO: 30795 - DNA, 65 bp, Mus musculus
catatacatgcccgtagacaaccagacatctacattcaggggatattcagggacaacggtggtgg

SEQ ID NO: 30796 - DNA, 65 bp, Mus musculus
cccaatgacaggttcacatctgaggttgccatgagggtgatggaatgcactgcctgtatcatcat

SEQ ID NO: 30797 - DNA, 65 bp, Mus musculus
cctctcccttaagtaatctgatccagtttactctgctcaagtaaaggaacggtacagcctgaaaa

SEQ ID NO: 30798 - DNA, 65 bp, Mus musculus
ctaagagcttgtatcgtttggaaaagccagtgaaggcttctccactagccatgggaaagctacgc

SEQ ID NO: 30799 - DNA, 65 bp, Mus musculus
atgctgaaggaggtggtaaaagacaccttgaagaggcaccacatcacggaggcccatgagagctt

SEQ ID NO: 30800 - DNA, 65 bp, Mus musculus
cactcccttaggaatatccaatcaaagatactcagtgagagccatctgacagtaccagctgcttc

SEQ ID NO: 30801 - DNA, 65 bp, Mus musculus
aagtcaactgaaatgaactggcccccttgagccttccccaaatacctggtacccactttccagcc

SEQ ID NO: 30802 - DNA, 65 bp, Mus musculus
ccccagtcatacgtgagagggcttcagcaacttttgcttatttcaagattcatctcaagcatctc

SEQ ID NO: 30803 - DNA, 65 bp, Mus musculus
aaatctaatgtggaagtccaaaagtaactgtgaagtcagttctatagttgagtgtgcctatcttg

SEQ ID NO: 30804 - DNA, 65 bp, Mus musculus
tgttctaaacttccacagttcaaatgaaagcaacatagacttttgaggtgtatgtccatctgcct

SEQ ID NO: 30805 - DNA, 65 bp, Mus musculus
cctgtgtacctcactgtagatggtatgcgaatggtgggtaacagtatgtcaagtgtgtgatttcg

SEQ ID NO: 30806 - DNA, 65 bp, Mus musculus
ttaagtgacatgagggaatgaaggttcctgtgcatctaagacccaaagactcctcacgcccagca

SEQ ID NO: 30807 - DNA, 65 bp, Mus musculus
agttccaaggaaggctttccagctccagcacctgccttcttcggtgagaagactcttaaaagggc

SEQ ID NO: 30808 - DNA, 65 bp, Mus musculus
ccctctaccaaacctttcgtgggcttggaggaactaaggcacacaaagttcatgctctgagtctt

SEQ ID NO: 30809 - DNA, 65 bp, Mus musculus
aatgaggtggataatgaggtgggcattcagaggggcttctgcaaacctagagtccaggaggcaat

SEQ ID NO: 30810 - DNA, 65 bp, Mus musculus
tcagcaatggtgccaacatgaatctacctcgtgccagagtctgagtagcctagtctagcacccaa

SEQ ID NO: 30811 - DNA, 65 bp, Mus musculus
ctctgcaaataatgatgttgtcattcgtgttacatatactgcccttcgctcaagagggtctcctg

SEQ ID NO: 30812 - DNA, 65 bp, Mus musculus
gagttggacaagcctcgaagtaagttggatgcctaggatcccagcactactgtggttaagacagt

SEQ ID NO: 30813 - DNA, 65 bp, Mus musculus
tctgcttcttctgctataacacacagagctagttaaaaaaccctggagatcgcccaaaaatgttc

SEQ ID NO: 30814 - DNA, 65 bp, Mus musculus
tcaccaccttcaacatgtacacgaggatggtgctggagttcaagtgcaggcacagcaagagcttt

SEQ ID NO: 30815 - DNA, 65 bp, Mus musculus
aaagagtggtggtctgggctttccagggagtacctgttaagggcttatgcacaagggtgacaaca

SEQ ID NO: 30816 - DNA, 65 bp, Mus musculus
ccctctctgtaatgggagatgccaggcttggggcccaggaacccctttccagagcggcaataaaa

SEQ ID NO: 30817 - DNA, 65 bp, Mus musculus
ctggattttggattgaagagtcagcccctggcaccttggggatatccttgcggtggagacacaga

SEQ ID NO: 30818 - DNA, 65 bp, Mus musculus
ctataggctcttctgtcctctcactaccttgggtctcagtatggacttgtgaccagcggtggaga

SEQ ID NO: 30819 - DNA, 65 bp, Mus musculus
taagatgatgagaaataccaacattggaaaacggcaaactcccatcataccagcacaccaggggc

SEQ ID NO: 30820 - DNA, 65 bp, Mus musculus; identical to SEQ ID NO: 23716

SEQ ID NO: 30821 - DNA, 65 bp, Mus musculus
gggctcagcagaaaggaatagaagctccggagtgaactcaaacagtgaacttcccagaaagaatg

SEQ ID NO: 30822 - DNA, 65 bp, Mus musculus
ctttgtgatgaccatcgtgatgggttccgtagaggtgggagcagcagctaaagtcaagagcattt

SEQ ID NO: 30823 - DNA, 65 bp, Mus musculus
cagggctgtcagttcttggccagccaggacccttgaccgagtgctccggtgctatggccgcccca

SEQ ID NO: 30824 - DNA, 65 bp, Mus musculus
ttaggccaaagccatcatctggaatcctgcgtgggaccctggacacacggacacagacacctgcc

SEQ ID NO: 30825 - DNA, 65 bp, Mus musculus
ttgatgtcatggtgggacttggcccctgcttgaccctggcagaggtggatggtgattgggatata

SEQ ID NO: 30826 - DNA, 65 bp, Mus musculus
tcccatggagttagtgcaggcacctgaaagtgagtggtatctgtccagagcagagggtcagaccg

SEQ ID NO: 30827 - DNA, 65 bp, Mus musculus
atggcttaacagaaaaggagtgtgtgagggagaaattaacttactgcatgaattcctgcaaacag

SEQ ID NO: 30828 - DNA, 65 bp, Mus musculus
ctaggttgattcctatgtgacggggtgagaagatcctcccaggtagaggcgttgagaagttacat

SEQ ID NO: 30829 - DNA, 65 bp, Mus musculus
tgcgggagaggagcggcaggggccgggctgcaggacagccggagatcgctgttggcccgcggtgc

SEQ ID NO: 30830 - DNA, 65 bp, Mus musculus
acctgggaggcagcatggttgaccaactcattgcagagaacctggaatcagcatcccaaattcaa

SEQ ID NO: 30831 - DNA, 65 bp, Mus musculus
cagtgcgagttcaatggctgaggtgaggcacctcccgggcctcataacccaattcagactactct

SEQ ID NO: 30832 - DNA, 65 bp, Mus musculus
gtcttgaaagggttacagggatttaccattcactttatagcgtgcttagtctcctcgctacccac

SEQ ID NO: 30833 - DNA, 65 bp, Mus musculus
acatcctggacagcagtgatgagatggatgcccaggaagaaagcactcaggaaagatcagtctcc

SEQ ID NO: 30834 - DNA, 65 bp, Mus musculus
tcacagagacaggcacagccaaagtcacaggcacagacacaggcacagccaaagtcacaggcaca

SEQ ID NO: 30835 - DNA, 65 bp, Mus musculus
gcactgactacattacctaagattctggttagcctgtggctgcatttcatgaccagttggatctg

SEQ ID NO: 30836 - DNA, 65 bp, Mus musculus
gtcacataagttaggtgatccaggttttgtggtctttgcaacatttgtggtcattgtggccttga

SEQ ID NO: 30837 - DNA, 65 bp, Mus musculus
gtttgcaagtctcccaagcctcaaaccctaccatttatttttcagtcttagtagatgtccttgct

SEQ ID NO: 30838 - DNA, 65 bp, Mus musculus
gatcacaaccagttacagatttctttgttccttctccgctcccactgcttcacttgaccagcctt

SEQ ID NO: 30839 - DNA, 65 bp, Mus musculus
gctggtccgaaggtagtgagttatctcaattgattgttcacagtcagttacagattgaactcctg

SEQ ID NO: 30840 - DNA, 65 bp, Mus musculus
acgtgtaagactttcagacaaccatttaaccgtaagacgtcgagaccatgcttatcatcgtataa

SEQ ID NO: 30841 - DNA, 65 bp, Mus musculus
ggcccagcatatgtctaacatcagcgctatgtttgccacctgcaactcagaaaatccagaggaga

SEQ ID NO: 30842 - DNA, 65 bp, Mus musculus
accgcgaatcgagctagaagagatgggaccatcactggacctggtcatgaggaggacacacctag

SEQ ID NO: 30843 - DNA, 65 bp, Mus musculus
actgaggcacagttgggagttaatcacatcatggaagtggaaaccactgaacctgagccagactg

SEQ ID NO: 30844 - DNA, 65 bp, Mus musculus
tgcgcctgcaagctctcctcaagaaggaagcagttaccaactcagtgttacacattccattcttg

SEQ ID NO: 30845 - DNA, 65 bp, Mus musculus
tccacttcacatcctcctggagcacgaagagttaatggagcacacatcatcctaaaacatgcccc

SEQ ID NO: 30846 - DNA, 65 bp, Mus musculus
ctcaagaacaacctcaacaaccagcaccatgtgtggctactacggaaactactatggcggcagag

SEQ ID NO: 30847 - DNA, 65 bp, Mus musculus
ggctaatccatagtcattgcttgccaaggataccactttcattcctgcctgttcccatgttggac

SEQ ID NO: 30848 - DNA, 65 bp, Mus musculus
agaacgaagctgactgctactaaggcgtgtccacgtcctgtccctgtttccatcctgtgccagca

SEQ ID NO: 30849 - DNA, 65 bp, Mus musculus
tggaaggggctgagtctgagtctgaagagacggtgagagggagttttagagcgtgcatgataaca

SEQ ID NO: 30850 - DNA, 65 bp, Mus musculus
ttcagtgaccccccacctgccgatgcgtggagagagagcaagaaacttgattgtgaagagaagat

SEQ ID NO: 30851 - DNA, 65 bp, Mus musculus
cccctgttcgtccagcaattggagatgtcgactaagagcaaagagatcgtatgtctgtctgtcga

SEQ ID NO: 30852 - DNA, 65 bp, Mus musculus
gggtgaaagttcctgaagacctgaaagatccagaagtattccaggtccagtcgctggtgctgaaa

SEQ ID NO: 30853 - DNA, 65 bp, Mus musculus
ttcctggcactggacgacgagactctcaagaaggtgcaggctctcaagaagagcaagctgctcct

SEQ ID NO: 30854 - DNA, 65 bp, Mus musculus
cctacaacctgacatcagccacattctggaagaagatacctaactcccacacattgtcctctggc

SEQ ID NO: 30855 - DNA, 65 bp, Mus musculus
gggatcgatggggaaacagtagtcttgaagaacatgctcattggtgtaaacctgatcctgttggg

SEQ ID NO: 30856 - DNA, 65 bp, Mus musculus
ccaagaaaatggttgctgcctttagtcacatgcgcttatagtcaggatttagcaaggtgacgaag

SEQ ID NO: 30857 - DNA, 65 bp, Mus musculus
aagtcactggctgaaacaggcaagcccagcggtatgaaaaggtcaccctctgccaccgtgcagag

SEQ ID NO: 30858 - DNA, 65 bp, Mus musculus
ttaaaacaccgggttttggatctgcactgtcccggatgtcctctggtgctcaaagacccttttgg

SEQ ID NO: 30859 - DNA, 65 bp, Mus musculus
atgttcaatctagaaaagcttcggtcagcaaggtggtcagctgcaaggtgcacactctacatccc

SEQ ID NO: 30860 - DNA, 65 bp, Mus musculus
agcaaagaagtgtaacattccatctaggctcactgcccacagccctttatctccacatccgccct

SEQ ID NO: 30861 - DNA, 65 bp, Mus musculus
cagagtcaagcacttctttattagctccccaagtccaatctccacagttgtatccctttgcctgc

SEQ ID NO: 30862 - DNA, 65 bp, Mus musculus
cacagacatcctaagatgcacctcagttctagctctaggtctgcccctgacttctggggatctta

SEQ ID NO: 30863 - DNA, 65 bp, Mus musculus
attcacagtccaaatgtcccatccctatatctaagagaactctttggtcctcactacttcccttc

SEQ ID NO: 30864 - DNA, 65 bp, Mus musculus
caaaagtggccggataacaggtcataaaaccattacgatccacatggtgtttggaaagaattggg

SEQ ID NO: 30865 - DNA, 65 bp, Mus musculus
gcgaccctgtccttcctcagtgtctctcagcagtaaacctgatacagttcctaagatcccgccag

SEQ ID NO: 30866 - DNA, 65 bp, Mus musculus
ttttgacccgaactactttcaagtccttggtgtttctcagtccctactccattttcgaagtattc

SEQ ID NO: 30867 - DNA, 65 bp, Mus musculus
attcctggtccagccactcaggataagatagttctggctcggatccacagatggatgacacgtgt

SEQ ID NO: 30868 - DNA, 65 bp, Mus musculus
aagaattcaggctgtttagagcatggctctcctgtctttgaaactctttggggaatacctttcaa

SEQ ID NO: 30869 - DNA, 65 bp, Mus musculus
gggccagtactcgtgccaaggggaactatgcgtgcgccttctctaatcgcaggctctactctttt

SEQ ID NO: 30870 - DNA, 65 bp, Mus musculus
cccacttaacctctgggaaggacatggagagctgaagtgacaaatgggctcattctcaggccact

SEQ ID NO: 30871 - DNA, 65 bp, Mus musculus
acccctgcagcgaatccagcagcgaagacctggaaagttaagttcaaggaagctagcggttcctt

SEQ ID NO: 30872 - DNA, 65 bp, Mus musculus
gaaataagacggaaactcctttttgtgactttcttccatccccccgcacaattacatgggatgat

SEQ ID NO: 30873 - DNA, 65 bp, Mus musculus
aaactgaggaggcacagcgtggggcagagattcgtaagaaaccaagagaaaagcgttgacctcag

SEQ ID NO: 30874 - DNA, 65 bp, Mus musculus
tggggatgcagcactgcaaaggcatatgtggtatctgccagatgcaagttctataaacagaggca

SEQ ID NO: 30875 - DNA, 65 bp, Mus musculus
cagcttcttcctttgatgtggatgatactgtgactttttcgtgcagatacctctgttcagtgtac

SEQ ID NO: 30876 - DNA, 65 bp, Mus musculus
ccctggctaggagctgacctcttgtgaagaagtcaggacatctctgaaaggacagacgtgggtgc

SEQ ID NO: 30877 - DNA, 65 bp, Mus musculus
agacaccctgggctctgtagctcatgtgctgatgggtgcttctagagaatgaccttggctgcctt

SEQ ID NO: 30878 - DNA, 65 bp, Mus musculus
tggctgcccttcactccccgacaaaacatttgcccggagaacaagagaagccctcaatgaccact

SEQ ID NO: 30879 - DNA, 65 bp, Mus musculus
gtgaatgaactgactagttaaggatgaagctcactcaccactttagctggaagtaacgagggcag

SEQ ID NO: 30880 - DNA, 65 bp, Mus musculus
tgtggcggattgcgacgatttcgtgctggatagtcgtactccactctttctacacttctcgacta

SEQ ID NO: 30881 - DNA, 65 bp, Mus musculus
acttcttgagatttccgagatttagacatgctcaacctcgcctggtctatgccagtccctctgcc

SEQ ID NO: 30882 - DNA, 65 bp, Mus musculus
atccaagccctttccattctctgttcgctgctgttcgccgtcctccttgctttccttctcgccat

SEQ ID NO: 30883 - DNA, 65 bp, Mus musculus
gccttcggtttcacaactatgaaatgggtgggatgctatggaatatgatgagaagtcggttccgg

SEQ ID NO: 30884 - DNA, 65 bp, Mus musculus
gagggctgaccagattcaggagcacagcggtgtgcttctggctgtgtacacaggtgctttatttc

SEQ ID NO: 30885 - DNA, 65 bp, Mus musculus
agctggacctgtggaccttgctccagttcctgacaggacagtcttgttgcacttggagtttacat

SEQ ID NO: 30886 - DNA, 65 bp, Mus musculus
accgtgttgctacaaggagatgaactgactgcagatcccataggaaccaacgcagacatggccat

SEQ ID NO: 30887 - DNA, 65 bp, Mus musculus
ccctgggttaaatgtcaaagatatataagccctgctctttatggtcttttggatgaaaggacact

SEQ ID NO: 30888 - DNA, 65 bp, Mus musculus
aattgatcttgattgttccgttgcttatctactcagtgagacaatggcaccctcctccaaagagc

SEQ ID NO: 30889 - DNA, 65 bp, Mus musculus
atgcattgccccttgcacaagaaacctgcagaggactctcatcgatgggcatcagagttcagcct

SEQ ID NO: 30890 - DNA, 65 bp, Mus musculus
tgggagtatcctcattgccttatattgccatcacccaacacatcattgtataatgcctgtcaccc

SEQ ID NO: 30891 - DNA, 65 bp, Mus musculus
tacagttttcttctgctctcgtcttcaccaggctgcttgagtttgacagcaccaatgcgtccgag

SEQ ID NO: 30892 - DNA, 65 bp, Mus musculus
atatcagtggggttatccatgccctgaaggtcagtcaagcagggaagcattagactcgtctctgg

SEQ ID NO: 30893 - DNA, 65 bp, Mus musculus
gccatgggtaggaatgctcacggtgaatgggccaacttgtcatggaagaagccctcattttcagt

SEQ ID NO: 30894 - DNA, 65 bp, Mus musculus
ggtcagaagtgggtggtgtatctcttgactctggaggtatgtagatggtcttgagtgtcatgtgg

SEQ ID NO: 30895 - DNA, 65 bp, Mus musculus
gcgcatgattaacatccaagcgatgcctcaatctgtcacgcccattgtgaactcagatgctactc

SEQ ID NO: 30896 - DNA, 65 bp, Mus musculus
gctatgagacagcatcacaagccagtgggcttggtgataacaactctgctttgtggtgcattagg

SEQ ID NO: 30897 - DNA, 65 bp, Mus musculus
catctggagattagggcatgtctggctgagaaggaaaaccttgtcttggaacatatctgccagcc

SEQ ID NO: 30898 - DNA, 65 bp, Mus musculus
atctggaaaggctgctgctgctgctcgtccaaccttcgcgagcttggaatccgcagagcgctgca

SEQ ID NO: 30899 - DNA, 65 bp, Mus musculus
gggtggctgagatcctaattcctgggatgcaggtgtaaactgacatactcagaatgacaccccat

SEQ ID NO: 30900 - DNA, 65 bp, Mus musculus
ctggtggccggaagttgcgggtcctgcaagtatggcggcgtcgaaggtgaagcaggacatgcccc

SEQ ID NO: 30901 - DNA, 65 bp, Mus musculus
ttatcactctgaggtgctcaggtcacagagaagggacttaattgggaaggtcatctgattccggg

SEQ ID NO: 30902 - DNA, 65 bp, Mus musculus
gctctcttaacttagctatatctccaataagctcatctcgttgcttcttgtactcatcacgttcg

SEQ ID NO: 30903 - DNA, 65 bp, Mus musculus
gggacctggatgtcaacgtaagaacagcttctaagtatgacgactgctgcttccttcacctgcct

SEQ ID NO: 30904 - DNA, 65 bp, Mus musculus
gacgtcctatactctagggtttgcaagcctaaaagaagagacccaagacccgtcacagaccagct

SEQ ID NO: 30905 - DNA, 65 bp, Mus musculus
atatctggcattgcgaatccactctcggcagcgattggcagattgctactctggctttactcctg

SEQ ID NO: 30906 - DNA, 65 bp, Mus musculus
ctggatgaccaacactggagactctggccttaccatgtggaaatagttttcctgaagtctggaac

SEQ ID NO: 30907 - DNA, 65 bp, Mus musculus
gttgactccctgcttatgattgggaatcttgcatatacaacctcccttcagctggatagggcagg

SEQ ID NO: 30908 - DNA, 65 bp, Mus musculus
ccatggcgaacttaaccagaagctgaatacgatgaagtcagggcatttggacaagcaggggaaca

SEQ ID NO: 30909 - DNA, 65 bp, Mus musculus
atcggacatgaaaggaccctgtgagccgattgtcctatctccagcggccctgtcatccagctcac

SEQ ID NO: 30910 - DNA, 65 bp, Mus musculus
gtacacataatctcatctctatgtatttatgcatactgtagtgtttggatggtttccaagacaag

SEQ ID NO: 30911 - DNA, 65 bp, Mus musculus
ggcctcctagctctgattgagctttatgtcgaagaaacggtacctaacgacgcgatcattccggt

SEQ ID NO: 30912 - DNA, 65 bp, Mus musculus
gattgggatccgtggggcgtatgcaccctgctcgccagcgcttctgctccttctgcctcagtttt

SEQ ID NO: 30913 - DNA, 65 bp, Mus musculus
cgctgtgatgatggattccaaaaccattcgtaggttccaccagaagtgctgtgttggctagttcc

SEQ ID NO: 30914 - DNA, 65 bp, Mus musculus
tttagtgtgcctgtggggcctgtcttgtcattctcacctaggaaacattccaagattggtgggtg

SEQ ID NO: 30915 - DNA, 65 bp, Mus musculus
gctacacctaacagccttgcctcggtagccagagagctcacgttaggaacagacaacgggcctgg

SEQ ID NO: 30916 - DNA, 65 bp, Mus musculus; identical to SEQ ID NO: 23716

SEQ ID NO: 30917 - DNA, 65 bp, Mus musculus
ctctcagcactgatacctgctcagcagcaactcctccttcagcaagctcaggcccagctgctggc

SEQ ID NO: 30918 - DNA, 65 bp, Mus musculus
tctacttctgacacctggaggaagaaactgaaggacctggcttcccgagtgactgtcttcactaa

SEQ ID NO: 30919 - DNA, 65 bp, Mus musculus
cagcacgggaattatttcctgggtttctgtccatctaaggcttaggtgtagttggcattcgttct

SEQ ID NO: 30920 - DNA, 65 bp, Mus musculus
ggtagaagatgacgatgaggtctttgtgtctccagacgcactcaaagtccatcagttgccttgag

SEQ ID NO: 30921 - DNA, 65 bp, Mus musculus
acgttgatgatggtttccgtaatatgtcaacagcagacgaagcctcacgttgggcgttccaccac

SEQ ID NO: 30922 - DNA, 65 bp, Mus musculus
gttctatagagagcaggtggctctgtgaaagccacaagaatgccaggatcagtgttggctcttct

SEQ ID NO: 30923 - DNA, 65 bp, Mus musculus
gagctcataactacctatatgtctttacttcagggcatttgatgtactctgtcctccaagggtgc

SEQ ID NO: 30924 - DNA, 65 bp, Mus musculus
tgattgagcagatgcagctcatcaagcacatgatgcatacaccacagcagccactcatcgagcag

SEQ ID NO: 30925 - DNA, 65 bp, Mus musculus
gggagtataactcagttgacagaaatgcctgccctgtatgaacaaagtcctggggttgatggtgg

SEQ ID NO: 30926 - DNA, 65 bp, Mus musculus
ctgtgcctgccagaaccttctgctgcatcctcacactcactaagcacacctgaagctttctattc

SEQ ID NO: 30927 - DNA, 65 bp, Mus musculus
cacatggcagacaaagcaccctgtagaaacagaccagtctggcacttccttggactacttgtttc

SEQ ID NO: 30928 - DNA, 65 bp, Mus musculus
ggcctctttgaactagtacctccctgtttcctaatgcatacacagagtgtaggttgcacaaggac

SEQ ID NO: 30929 - DNA, 65 bp, Mus musculus
tgattttatttgtgtgaaatggcttttcccgtgacaagccagcactgatgagactctcagtagct

SEQ ID NO: 30930 - DNA, 65 bp, Mus musculus
atatagtgggcacgtactggtctcagagccagaggaaggcatcagagtccctggggttggaatta

SEQ ID NO: 30931 - DNA, 65 bp, Mus musculus
gcttgggaggtagagttatggagagggcaaggaagcaggactggaaagatagacttatggatcca

SEQ ID NO: 30932 - DNA, 65 bp, Mus musculus
taacatggaggataaaacaggaaaacacatggccttgcagacacatgcctggctggatttatggt

SEQ ID NO: 30933 - DNA, 65 bp, Mus musculus
aacacctgcctccattgcaggcttcagtgtcgccatctacctgacaccgcacaaccctactgtgt

SEQ ID NO: 30934 - DNA, 65 bp, Mus musculus
ctccccactcaccttctcaacctattatgcgtcagtaactacatctgtctcacttgtcagtcagc

SEQ ID NO: 30935 - DNA, 65 bp, Mus musculus
gtagtggtggcgcacgccggtaggatttgctgaaggaggcagaggcagagggatcacgagttcga

SEQ ID NO: 30936 - DNA, 65 bp, Mus musculus
gcagcatgtgcagagaactgaagactcatcatctgaaggctctatatccagcagcatgtgcagag

SEQ ID NO: 30937 - DNA, 65 bp, Mus musculus
ggacaggacagtgcttgtttaaggctatatttctgctgtctgagcagcaacaggtcttcgagatc

SEQ ID NO: 30938 - DNA, 65 bp, Mus musculus
gttaatcatggccccatctctgtcctgaagctggtgtctaacaagtgttccatcagatcaagtga

SEQ ID NO: 30939 - DNA, 65 bp, Mus musculus
cctcaaggtgcacgtgaaccccaagtacattgttctggagtctgacttcaccaacaacgtggtga

SEQ ID NO: 30940 - DNA, 65 bp, Mus musculus
gacttttgccaaccgttaatggggtattatatccatttgtctgaatggagctctgtggaagccca

SEQ ID NO: 30941 - DNA, 65 bp, Mus musculus
tccccttgcggctgtgaccactgctgttcaggagctgctgcgtctggctcagtcctatccagcag

SEQ ID NO: 30942 - DNA, 65 bp, Mus musculus
gatggggcactcgcattctagaagctgatagtcttcatccacagttaggtttatctcagatattg

SEQ ID NO: 30943 - DNA, 65 bp, Mus musculus
cctgcggacacatcgaagatattgctcacctcttacgacggaagcatcaggtcagttcacttgaa

SEQ ID NO: 30944 - DNA, 65 bp, Mus musculus
ggtgccatttcgtgatttaggggatgatatcccagaaattattgaagatggccagacatttgaag

SEQ ID NO: 30945 - DNA, 65 bp, Mus musculus
aatcgaacccctattccctggttgagctctggggagcatgtagactacaacgtggatgttggtat

SEQ ID NO: 30946 - DNA, 65 bp, Mus musculus
gagaaacaatattagtgataattgatacactatggcagttggttaatggccagacacgacaaccc

SEQ ID NO: 30947 - DNA, 65 bp, Mus musculus
ttccccaatgacttatctgcaatgacatcataacatctgccacctgctcaaatactccatgaacc

SEQ ID NO: 30948 - DNA, 65 bp, Mus musculus
ctcaagccaatggtcagtcaatcctcttttatctgggcaatgggatcacaacagaacacacagtc

SEQ ID NO: 30949 - DNA, 65 bp, Mus musculus
tttcagcatgaggtctaccctccgtgtaagcctgagtgtgagtccagcctcttagaacacccagt

SEQ ID NO: 30950 - DNA, 65 bp, Mus musculus
gagagagagagagagagagagagagagagtgccagccagcatgccacagagtaggtgtggagatc

SEQ ID NO: 30951 - DNA, 65 bp, Mus musculus
ccttggcaaacatcatatattgttcgttcaacgccaacagcagtttaaactccgcgttattgaac

SEQ ID NO: 30952 - DNA, 65 bp, Mus musculus
atctggtctaactggggactcaggggtttccagtggctatatacgccatgatgatggtctctgtg

SEQ ID NO: 30953 - DNA, 65 bp, Mus musculus
tcagagatgctgtctgtacggagtgcagtcttgctgggactggagcttgttgcatgcttatctct

SEQ ID NO: 30954 - DNA, 65 bp, Mus musculus
agtggggacctcactctgagggcagcttccagcattgctggcccaataaaggacttgggaatggt

SEQ ID NO: 30955 - DNA, 65 bp, Mus musculus
tcacgtgcatgtgtaagtcagggggcaaccttgggtgttcttcctcaggagccattcattgtggg

SEQ ID NO: 30956 - DNA, 65 bp, Mus musculus
cctcagttcagctttaagggcaacagccccatacaagtttccgtcagagcagcatggagttaaag

SEQ ID NO: 30957 - DNA, 65 bp, Mus musculus
tcccaggtgctcagtgggaactatagctgctatctatcctgtgccctcaggagatgttgccaaaa

SEQ ID NO: 30958 - DNA, 65 bp, Mus musculus
tagcgccatcttccttgaaactcctgcgccatgagagcgaagtggcggaaaaaaaaaatgcgcag

SEQ ID NO: 30959 - DNA, 65 bp, Mus musculus
cattaaacatttgagccttgatcagaacgctgtcttgtctccatttctctgtcttgtgcacctag

SEQ ID NO: 30960 - DNA, 65 bp, Mus musculus
aatatattgctaaaatgtcagggagcgctaatgtcagctgtcaaggactagatttactttcgcag

SEQ ID NO: 30961 - DNA, 65 bp, Mus musculus
ccatttgagatccagagggctctaaggtgacatcagggacctttcacactggtgccagtctttaa

SEQ ID NO: 30962 - DNA, 65 bp, Mus musculus
gcagtaggagactgagcagctggtcacagtgcatctgtggtcaagaaacagagaaaagctagcca

SEQ ID NO: 30963 - DNA, 65 bp, Mus musculus
ttgagtgtataccagcttagcagcaatggcacaggacagacacctagcacctctcgaaagtccct

SEQ ID NO: 30964 - DNA, 65 bp, Mus musculus
cagtgttgggatccttgtactctggaaccatgccatcactgatgtcatgctcatgctacctagca

SEQ ID NO: 30965 - DNA, 65 bp, Mus musculus
gagctccacacctctagatctcaatgattcggttggcttctcagtggaacccaactgaagttgtc

SEQ ID NO: 30966 - DNA, 65 bp, Mus musculus
agtcaagtagctggtgaactgtgaggtccccatgactcccttcagtcttgtccagggtctagcag

SEQ ID NO: 30967 - DNA, 65 bp, Mus musculus
atagttggaaccactagaatcattactgaatatggtgagatctttcttttgcacttaatgctgga

SEQ ID NO: 30968 - DNA, 65 bp, Mus musculus
gtccatagtcccagcatttagagacagacaccagcaaaccctcagccaaccagggctacataaca

SEQ ID NO: 30969 - DNA, 65 bp, Mus musculus
agctctgttgtcatcagcccacctgagttctatcacacaccaggttctgttgagaatcttcggcg

SEQ ID NO: 30970 - DNA, 65 bp, Mus musculus
ttatgataactccggtaacttccctaaactccagatctctaggctccataccaatccccatcacc

SEQ ID NO: 30971 - DNA, 65 bp, Mus musculus
tcccgaaccctgggaccggtccaagggcgctcctccaagccgagccttggagggcaaggccggca

SEQ ID NO: 30972 - DNA, 65 bp, Mus musculus
aactgttttctgagcagctgaagacaccgtatttcactctgtatctcagtgatagggagtaggtg

SEQ ID NO: 30973 - DNA, 65 bp, Mus musculus
aagactcaccggatccatcagagcgtcggttttaccagagcaaagcaagagcctgtgtggttctg

SEQ ID NO: 30974 - DNA, 65 bp, Mus musculus
tgtgtatcaaaacaagactccacattggggcatccacactgaggccaccttgtgaactaggcctc

SEQ ID NO: 30975 - DNA, 65 bp, Mus musculus
cagaagtctggagagccctgtcttcctctgccaatgtgctgggaagactgagagaagagaaatga

SEQ ID NO: 30976 - DNA, 65 bp, Mus musculus
agcagctcaatgatctcaaagcctgtgtgatgcaggaacctcctctgacccaggaagactccctg

SEQ ID NO: 30977 - DNA, 65 bp, Mus musculus
cattctgcaatgaagtccatcagcagctcaatgacctcaaagcctgtgtgatgcaacaggtcggg

SEQ ID NO: 30978 - DNA, 65 bp, Mus musculus
ctggtcgggatgaaggaactgcccctgacccaggaagactcccagctggctatgaagaaatattt

SEQ ID NO: 30979 - DNA, 65 bp, Mus musculus
gttttggaaccagactttcatgtagcctaagctggccttgaagttcctaaggatcagaggctggc

SEQ ID NO: 30980 - DNA, 65 bp, Mus musculus
ctcattgctgacaccaacttcgatgtgcttatggtgaagctcaagggcttcttccagagtgccaa

SEQ ID NO: 30981 - DNA, 65 bp, Mus musculus
ggtcatgtttcgatcgcctactcaaagttaatgtatagccatatagatggttacttctcgatggc

SEQ ID NO: 30982 - DNA, 65 bp, Mus musculus
tgagtcagcctgcagcctcgtcagattcagagacctccgacagtgatgatgaggtcccaggtccc

SEQ ID NO: 30983 - DNA, 65 bp, Mus musculus
atggaacctgcccacttatagctggcccagggggactcgaatctttctggagcctcttgcttaag

SEQ ID NO: 30984 - DNA, 65 bp, Mus musculus
caccttttcacagagagctgcagcatctctcccaagctccgttccatcgctgtctactatgacaa

SEQ ID NO: 30985 - DNA, 65 bp, Mus musculus
accatccccatgtttgtgccagagtctacatctacactacagaagttcacaagctggttcatggg

SEQ ID NO: 30986 - DNA, 65 bp, Mus musculus
caaggaaaagcccacgaagcttcaactttccagaaagaactacaagagtaaagccaggattggga

SEQ ID NO: 30987 - DNA, 65 bp, Mus musculus
ttcaggtccctggaataaaaccgctccggtacaagcgcctcctgctccagtaacagttacagaaa

SEQ ID NO: 30988 - DNA, 65 bp, Mus musculus
ctttgagtctacacagtgaacggaatgtggtaacttctaggtgccccgcacttagcctagcacct

SEQ ID NO: 30989 - DNA, 65 bp, Mus musculus
gctgtagtgtgtacgtgggactatggaactggacatctctgtgtatagaattcttcctggctgta

SEQ ID NO: 30990 - DNA, 65 bp, Mus musculus
gcaagatggatctgaggaggaaactgttctccaaggcacaaggaacctacgtttgggcaatgttc

SEQ ID NO: 30991 - DNA, 65 bp, Mus musculus
tattgttaccgcaattaggtcgttgagcctcagacggacgttcagaagcgcctgtgacatgactg

SEQ ID NO: 30992 - DNA, 65 bp, Mus musculus
cgcttcactcgaggagaaccctctcacacacttgttgagtaacgagctaccataaacacgcgata

SEQ ID NO: 30993 - DNA, 65 bp, Mus musculus
gtcagccgctcagaagataacgaggtaatacagtgtttcagcaattcccccgagcatctctagtg

SEQ ID NO: 30994 - DNA, 65 bp, Mus musculus
ggtgcaggcttcaaacctgtagctgtttagcgacagagtggttcaattccacctttcgggcgcca

SEQ ID NO: 30995 - DNA, 65 bp, Mus musculus
atgtgtggattcagaagcagaaaggcaggagctagcacctctctcacgctgggtacacttgtcct

SEQ ID NO: 30996 - DNA, 65 bp, Mus musculus
ctatgctaagttagccaatgatgcacaacctactgactggcccaatctagcccatcacctgtatt

SEQ ID NO: 30997 - DNA, 65 bp, Mus musculus
tgctgctgtatatcctggcggcaaaaaccctgatcctgtgcctggcctttgcgggcgtgaaaatg

SEQ ID NO: 30998 - DNA, 65 bp, Mus musculus
tggaaaccactgagcacagactggatgtgattctggctcctcacagctttttggtgtcacgcttg

SEQ ID NO: 30999 - DNA, 65 bp, Mus musculus
cctgaagccttcttgcctatctgggtaccaggtgtgacctcaagagatggctgctgtacactttt

SEQ ID NO: 31000 - DNA, 65 bp, Mus musculus
ctccagcaggatgtatgaatgctaaccactcctgtgttcagagtttcctcctcatgccctaactc

SEQ ID NO: 31001 - DNA, 65 bp, Mus musculus
gtgaccgtgactatgagatgacagatcagaaccatattaaacctgaacggagcaacagcatcagc

SEQ ID NO: 31002 - DNA, 65 bp, Mus musculus
cagttctatgcctgctcccattaagaaacctactctactgatataaaggtgaccagcctatctct

SEQ ID NO: 31003 - DNA, 65 bp, Mus musculus
accttatgctgggggattggaagggtggcagaaaaaagaacccaataaagtagccaaaagtaaag

SEQ ID NO: 31004 - DNA, 65 bp, Mus musculus
gaaggtctcagggtccaatgttatgccgttccacgtgtgctcaagtttgctcttctacctagaag

SEQ ID NO: 31005 - DNA, 65 bp, Mus musculus
atggaagacaacggcatcaagcatggagggctagacctcacgactaacaattcctcctcgactac

SEQ ID NO: 31006 - DNA, 65 bp, Mus musculus
ctgctttgcgtgtgagtgcgtctcactcacatagctaacccaaagggagccacctaagggtgctt

SEQ ID NO: 31007 - DNA, 65 bp, Mus musculus
gcctccggatgattggagagtctgttaccatggacatggcagttttgatggaaaccagttgttac

SEQ ID NO: 31008 - DNA, 65 bp, Mus musculus
ccctggggcctcagcctgcgtcctcctccatcagtggggctggcgagagctaggctggaaatcgt

SEQ ID NO: 31009 - DNA, 65 bp, Mus musculus
acagaagatgctcctagactacagtgtgtacatgggcaggtgtgtgccccaggacaaccgaagcc

SEQ ID NO: 31010 - DNA, 65 bp, Mus musculus
atggggaaaggtcagcgtctcgaagggaaggagaacacatgcaggaccacactgagcttctatta

SEQ ID NO: 31011 - DNA, 65 bp, Mus musculus
gaaaaatctgatttaaaagaaaagtctacacgaaataagaaggccaatcggttccatccttattc

SEQ ID NO: 31012 - DNA, 65 bp, Mus musculus; identical to SEQ ID NO: 23716

SEQ ID NO: 31013 - DNA, 65 bp, Mus musculus
gatctgagcgggaactgaagcctttactgcctgctgaataaagcctgttctccagggatgctcaa

SEQ ID NO: 31014 - DNA, 65 bp, Mus musculus
gagtagcctgccgatatagcagagaaaagcaagacaagaagaacctgggaataaaccccactcat

SEQ ID NO: 31015 - DNA, 65 bp, Mus musculus
aaggctgtctgatgcaggaggtgggggtgcaggaactttccctgacccaagaagactccctgctg

SEQ ID NO: 31016 - DNA, 65 bp, Mus musculus
tctcattaccttcagtgtgaacacaatcaacctgccaagacgctgcagcaatattgagcaattat

SEQ ID NO: 31017 - DNA, 65 bp, Mus musculus
agcactttcctaatggtcctggcagtgatgagctactggtcaacctgccctctaggatgtgacct

SEQ ID NO: 31018 - DNA, 65 bp, Mus musculus
cagtcagatgttgggattcatgagagttccgtatccaattttacaagatgtttctatgaaatgac

SEQ ID NO: 31019 - DNA, 65 bp, Mus musculus
gtcattgagtctgaaactctgatagaagacgtgctgagacctctggaacaggcattggaggactg

SEQ ID NO: 31020 - DNA, 65 bp, Mus musculus
gaagaaatttccaggacctgttgtcaacttgtctgagatccaaaatgttaaaagtgaactgaaat

SEQ ID NO: 31021 - DNA, 65 bp, Mus musculus
cccatccggtgtggagaaaaagcggcaacgagaaccgaccatgcagtggcaggaggacccagaac

SEQ ID NO: 31022 - DNA, 65 bp, Mus musculus
agtaccaggaatcactagaattagtactgaatatgatggaatcttccttttgcacttaatgctgg

SEQ ID NO: 31023 - DNA, 65 bp, Mus musculus
ccactacactacctgcctcaggaatctgctccaaggtgaagctgaaagaacagatggtgtcaaca

SEQ ID NO: 31024 - DNA, 65 bp, Mus musculus
tgtgtcaatggcagatagtaggcgtcaagagaggacatggccatcaggagagggcaagcagggtg

SEQ ID NO: 31025 - DNA, 65 bp, Mus musculus
cagtcaacttgctgccaagactgagtgaagagaaggagtgagtgtgagacaaagtgtggagagac

SEQ ID NO: 31026 - DNA, 65 bp, Mus musculus
cgcctggatggtggtccgagcagagatcttcaggaactttctcatcattcgaagacttaccagaa

SEQ ID NO: 31027 - DNA, 65 bp, Mus musculus
ggcccagatgtcccattttatagctgtcaagactgaggtccagagtagaagccttcaaagaagag

SEQ ID NO: 31028 - DNA, 65 bp, Mus musculus
gcttactctttcgagtacatggacagcgtaggaggagtgtgcgcagacctagggtggtttgaaaa

SEQ ID NO: 31029 - DNA, 65 bp, Mus musculus
cagcatcaagtgtctccaaaggactcttactaggcctggaagggctgttcccttaccctggaaaa

SEQ ID NO: 31030 - DNA, 65 bp, Mus musculus
gcccagttctggggaaatggagaacgaggtgttgtttcttctgtagtcggtctgcatacaactac

SEQ ID NO: 31031 - DNA, 65 bp, Mus musculus
ttctcaatggaaaaccagggaccttcccagaaggcccaagctcatttgggtggagaatgtccatt

SEQ ID NO: 31032 - DNA, 65 bp, Mus musculus
ggaaatcaagggacagaattgggaagagcaagtgaatagcctgcctgaggtgttcagaaaagccg

SEQ ID NO: 31033 - DNA, 65 bp, Mus musculus
caggccccttcaagttttcagttcaactggactgaagaaggcactgatagcccttgtttccatgg

SEQ ID NO: 31034 - DNA, 65 bp, Mus musculus
gtgtgattctctgtgctaacgtctgagacgcctttctgggttgtctacaaatggtttgttcctct

SEQ ID NO: 31035 - DNA, 65 bp, Mus musculus
ctagggtcaaggagctgttagttgactgttacaaacccactgaggccttcatctctggcctgctg

SEQ ID NO: 31036 - DNA, 65 bp, Mus musculus
ggacacaggaagatagcattgacctcgaatgcatctttgggtgagaaggtgactttggatgggcc

SEQ ID NO: 31037 - DNA, 65 bp, Mus musculus
tctggcaagaccaatgcctcactctctggagtcacacctcagctctccaatggaggatgctctct

SEQ ID NO: 31038 - DNA, 65 bp, Mus musculus
gtcaagtatggaaaatccctgcggttctgtatctgtgctacactgatgtgatgaagttggaccgt

SEQ ID NO: 31039 - DNA, 65 bp, Mus musculus
aaacccaagtattcggaagtaagaaccttcaggatgccctcaccagaggtggaagaggctagctg

SEQ ID NO: 31040 - DNA, 65 bp, Mus musculus
agtcggatcatgcttccagctccttcctgcaccacagtgactcctccctaggtcatgtgtcaata

SEQ ID NO: 31041 - DNA, 65 bp, Mus musculus
gccggtgttctaagggaccaaggtattggggtattatgggcatatggagtattaagtgcccgtga

SEQ ID NO: 31042 - DNA, 65 bp, Mus musculus
gtctcaagatttgaagttctaaacttgctttactgttggtccccaagagattcaacaggggccat

SEQ ID NO: 31043 - DNA, 65 bp, Mus musculus
tcacgaattccaggaactgtctctacagtccagccagcacttacccactctgaacgaacggaaaa

SEQ ID NO: 31044 - DNA, 65 bp, Mus musculus
gctcttgcctaccacccaccatactttctgggccaggttgacatgcctctccctccatgtttaaa

SEQ ID NO: 31045 - DNA, 65 bp, Mus musculus
gctaaggttcaagtcctagctatgaaggttccaataacttctacatgttccacaaaaatccacag

SEQ ID NO: 31046 - DNA, 65 bp, Mus musculus
gatcctggctgtcaccatttcagagatggacacggggaatgacgacaaacacacgcttcttgcca

SEQ ID NO: 31047 - DNA, 65 bp, Mus musculus
aaagtaaggtgactgctgtggcattgacagactctgttcacaatgtgtggcatcaagaagctggc

SEQ ID NO: 31048 - DNA, 65 bp, Mus musculus
ggagcggagaagtctaagaaaaccatcaggaaccaacaagctggtgtggtgtccttatgccttta

SEQ ID NO: 31049 - DNA, 65 bp, Mus musculus
agcccgacatgcagcttgaacatggggccatccagatccagtgaggccaggcactgcaggagcac

SEQ ID NO: 31050 - DNA, 65 bp, Mus musculus
ttccgtggagaggaacaactctgagtcttaaaccaattttttgaggccttgtcttggcaaggcta

SEQ ID NO: 31051 - DNA, 65 bp, Mus musculus
gcgctttcaaaagttgtattccaggcacagaagcatttaggatgggtaaattcacaccaactaaa

SEQ ID NO: 31052 - DNA, 65 bp, Mus musculus
tcagcaaagtgggaacatcgcccaaaccagacaaagagcaccgacagaggcttctgttttcgcaa

SEQ ID NO: 31053 - DNA, 65 bp, Mus musculus
ctttcctgtgatcccgccaagtgtaggaatgtttctgggaacagagatgtcattttcaaagataa

SEQ ID NO: 31054 - DNA, 65 bp, Mus musculus
gacctggaatgcacacacctgaccaagtcctcacctcgaccttgatagtcaacaaatgagcagta

SEQ ID NO: 31055 - DNA, 65 bp, Mus musculus
cttgattgcctaaggaaatgatcgccctgtagtttggccagctagtggttagaagggacccagga

SEQ ID NO: 31056 - DNA, 65 bp, Mus musculus
tcctactaaaagggcctatcttgatccatctttgcgctatcttgatccatttttggcctatcttg

SEQ ID NO: 31057 - DNA, 65 bp, Mus musculus
aaagcacgtgaatgcctgcacacgccaaggcaagtgagatgcccgttccacctccagttccagtt

SEQ ID NO: 31058 - DNA, 65 bp, Mus musculus
ggcaacagaggagcaccaagggaagtgaatttgcttggcttgctttgtctgctttctcgtttcct

SEQ ID NO: 31059 - DNA, 65 bp, Mus musculus
gtgtggacttggtcttccccgtgtgatgttgaccgtcactaccaacatttcactctcaaagtagc

SEQ ID NO: 31060 - DNA, 65 bp, Mus musculus
catgatctgctgattagcatttccatgcaatcaggacctgacaacatcctggttgctcctatctg

SEQ ID NO: 31061 - DNA, 65 bp, Mus musculus
gggttgcttgggaatgcagcccaaagcgggtggtaaactccatctaaggctaaataccggcacga

SEQ ID NO: 31062 - DNA, 65 bp, Mus musculus
tttccatacttgtacaggtaggactattcttcagctctctactccaggcaagccattccttaagg

SEQ ID NO: 31063 - DNA, 65 bp, Mus musculus
caccagagttgttctgggtgcaagaagtaacctagaggcatttgctgtgtcttcccaaacttgcc

SEQ ID NO: 31064 - DNA, 65 bp, Mus musculus
aaatgaggatctctccggtgtccgaaccatacaggatgctgtctctaggacagagtgctatcctg

SEQ ID NO: 31065 - DNA, 65 bp, Mus musculus
cggtctttgcccttgcagatcaaacagaggtatacagactatgttctatgtagcggcacacccag

SEQ ID NO: 31066 - DNA, 65 bp, Mus musculus
catacactcatgtaacagtgacagaagtctgtctcatcttctcccatagtctaaggtaatgtcta

SEQ ID NO: 31067 - DNA, 65 bp, Mus musculus
ctcctgttgcagggcatctgatactctcatacagcaaaataaaataataaaatgtattaatttaa

SEQ ID NO: 31068 - DNA, 65 bp, Mus musculus
atagaagctggcagaagcgactcacgtcagcggtttcctttcctgtggtaaaagctgatggctca

SEQ ID NO: 31069 - DNA, 65 bp, Mus musculus
tcgaaaaaccaaaaataataataattaataataataatagagtatatccccaaattgccacctag

SEQ ID NO: 31070 - DNA, 65 bp, Mus musculus
atgagaagatatatgctccccaaggcctcctcctaacagaccccattgagagaggacttcgagtt

SEQ ID NO: 31071 - DNA, 65 bp, Mus musculus
ccttcggcctgacaggtccaaaccctggactcatgagtacaggaaaaactcgtgaggctgacctg

SEQ ID NO: 31072 - DNA, 65 bp, Mus musculus
aagcacagacctgttgtggctcctttgtaccactttcagctgggcttagggcatcagcaaagtaa

SEQ ID NO: 31073 - DNA, 65 bp, Mus musculus
gtggccaagcagcgcaagccctggatgtgcaagaagcaccgcaacaagatgtacaaggacaagta

SEQ ID NO: 31074 - DNA, 65 bp, Mus musculus
aaatgcccccgaagaaaaggcgtcggtaggaccctggttattggccctcttcatttttgttgtct

SEQ ID NO: 31075 - DNA, 65 bp, Mus musculus
ttaggaaagtattctttgctgtctaaaagcactaaagacaaccaagccagtcaaaaatgaacacc

SEQ ID NO: 31076 - DNA, 65 bp, Mus musculus
agagagcggacacctcagtgtgaatccccattccaggagattctggcctctgctggtgtacagat

SEQ ID NO: 31077 - DNA, 65 bp, Mus musculus
cggatcttactacacacccagtaacagatgaagaacatcccaaggcacatccagcctcagtttcc

SEQ ID NO: 31078 - DNA, 65 bp, Mus musculus
ttagggcacaggtgtgtgctgctttccacctgactaaggacatacagccttgtggtggcttttct

SEQ ID NO: 31079 - DNA, 65 bp, Mus musculus
gtccatcatttctgtgtggcttccctgatctctcgatcaagttgagctgtccccagttgttcctt

SEQ ID NO: 31080 - DNA, 65 bp, Mus musculus
agaacttttcagctggggaacggtggataccaatggtttttgatcatcctgtgaaaaatgagcct

SEQ ID NO: 31081 - DNA, 65 bp, Mus musculus
ctgaactttcatcctgtgccaggttgtcaaagcttggccgtgattgttgcttggtcactttgtac

SEQ ID NO: 31082 - DNA, 65 bp, Mus musculus
tagcacatgtacctcacagaccaactggcaagcagccttcagggagctcgatccccaaacagcca

SEQ ID NO: 31083 - DNA, 65 bp, Mus musculus
taaaagctacaggtgaggaggtttctggaggacactggccacttccaggtgtgatgagaccagct

SEQ ID NO: 31084 - DNA, 65 bp, Mus musculus
aaaccgcccagcgcgtcgaaacatccctcacagaaagaccgccgaaccgacaaagcctctcgtca

SEQ ID NO: 31085 - DNA, 65 bp, Mus musculus
gccggctattagtgctgcattttgcaactgctatctgccattgatgatcgttctcaactctcttg

SEQ ID NO: 31086 - DNA, 65 bp, Mus musculus
tgctcttggacagcagagggtgaggtttgacagatacgactcaggcatcagagaagctgcaggca

SEQ ID NO: 31087 - DNA, 65 bp, Mus musculus
gtccagaaggcactttaaggaagtaagcgtcaaacatggctttggcagacaagagacttgagaac

SEQ ID NO: 31088 - DNA, 65 bp, Mus musculus
gctgctaacagtcaacttcatgggcaaagattaagctctctatatctggtcgtatcctggatgct

SEQ ID NO: 31089 - DNA, 65 bp, Mus musculus
aacatgggctccttccaccaaccaaggctaagacattgaggcctaggtaggaggattagcagggg

SEQ ID NO: 31090 - DNA, 65 bp, Mus musculus
attccgtggagaggaacaattctgagtcttaaaccaattttttgaggttctgctccaacaaggct

SEQ ID NO: 31091 - DNA, 65 bp, Mus musculus
ctttcttcctttcctttttctctggtgtgtcctagatagcatgtgctctgtgtgagcctcagtcg

SEQ ID NO: 31092 - DNA, 65 bp, Mus musculus
ctaactttgtcgcagagggaaaaaagtagaatcgaagggaaaaatcacgaaaattaactgggctg

SEQ ID NO: 31093 - DNA, 65 bp, Mus musculus
ccgcgatccttaccgctgctgctcactctattgctgccgctgttgctgaggatgtcgcccagctg

SEQ ID NO: 31094 - DNA, 65 bp, Mus musculus
agtacgaaatggaccttccgatgatttctgcactgtgccatcgattgcctcaacctggtcacagg

SEQ ID NO: 31095 - DNA, 65 bp, Mus musculus
tttagaatccatctgatggagaggaagtcggctacagtggagtgtatgtacggccacaaagggcc

SEQ ID NO: 31096 - DNA, 65 bp, Mus musculus
gaggaggacttcgagcagtttctgctgcccgtcatccacgagatgcgcgaggacatcgcgtcgct

SEQ ID NO: 31097 - DNA, 65 bp, Mus musculus
ctgttttggtgtctggtgctgagtactttcaggcagtattgcatccctgagagtggaatgactcc

SEQ ID NO: 31098 - DNA, 65 bp, Mus musculus
tgctttgctgcttcgttagaagccatacatgttcaccctgctactgaccccgagaccagttggcg

SEQ ID NO: 31099 - DNA, 65 bp, Mus musculus
cttgatcagttgcatccgtcaagttggcttgaaatagtcacctgcagttattgaggaccaatagg

SEQ ID NO: 31100 - DNA, 65 bp, Mus musculus
ctgggtacactcgaatccacgctacctttgtcttggggtgtggagtgtgttgagcgacttataca

SEQ ID NO: 31101 - DNA, 65 bp, Mus musculus
gtgggtctttgtggataagctgtctctggaaccatctgggtctctggatacatgacattcatagg

SEQ ID NO: 31102 - DNA, 65 bp, Mus musculus
gctgagtttcatctggattttcttcgacaccacatcagaccagtatttctcgcccaagaagtccc

SEQ ID NO: 31103 - DNA, 65 bp, Mus musculus
ggcatttgcatttctatctgactgcccacaggtaacagtggcaaacagacttccatcctggtacc

SEQ ID NO: 31104 - DNA, 65 bp, Mus musculus
accaccaagtcctgtggtccccaaccgcaaggaagataaggaagagaacaggaagagcacagtgg

SEQ ID NO: 31105 - DNA, 65 bp, Mus musculus
attctgctggtcatcggagggatccagatggttctctgtgccatccaggtgatcaatggcctcct

SEQ ID NO: 31106 - DNA, 65 bp, Mus musculus
tgtcaaggtcctgatagttccgagggagatgacctgcacccttttctgcacaagctgtagcagaa

SEQ ID NO: 31107 - DNA, 65 bp, Mus musculus
aatccttagagaacagaaaaccatggaaacgttctgagacaggcgacccaagcagattgcatttc

SEQ ID NO: 31108 - DNA, 65 bp, Mus musculus; identical to SEQ ID NO: 23716

SEQ ID NO: 31109 - DNA, 65 bp, Mus musculus
atctacaacaggagtcgggtattcgtggggaactgcgcctcccaagtcattctggctaattggaa

SEQ ID NO: 31110 - DNA, 65 bp, Mus musculus
gccgcgtgaagcacaagatgggcactgggcgggtgtcacctacgaggaagcacctttgattgcat

SEQ ID NO: 31111 - DNA, 65 bp, Mus musculus
aaaatcaacggcatcaccagctggaaacgcacgggccaggaggttcagaagcgttggaacgactt

SEQ ID NO: 31112 - DNA, 65 bp, Mus musculus
agactgccaatgctatcagggagctggctggcacccttcggcagggactggccaaactgagcgag

SEQ ID NO: 31113 - DNA, 65 bp, Mus musculus
tttctctggtacagtggtgtccgcctgactgcctcctgtaaccccaacttctaagccatcaattt

SEQ ID NO: 31114 - DNA, 65 bp, Mus musculus
aggatcccagcgcccagcagttacagaagcaatggtggctgacttcaaattccagcaacaaaatt

SEQ ID NO: 31115 - DNA, 65 bp, Mus musculus
cccagtatgctgtgagccttgtcctcccccagtgtgctgtgagccatgcccccctcagccatggc

SEQ ID NO: 31116 - DNA, 65 bp, Mus musculus
tgaccgacatgtggctgtattggcgcagcttgccggggtgtcactggagacagaatggaggtgct

SEQ ID NO: 31117 - DNA, 65 bp, Mus musculus
atgtcttaccaacagcagcagtgcaagcagccttgccagcctccacctgtgtgcccacccaagaa

SEQ ID NO: 31118 - DNA, 65 bp, Mus musculus
tcctcctccaaagtgtcctgaaccttgtcccgagccatgtcttccttctccatgccagcagaaat

SEQ ID NO: 31119 - DNA, 65 bp, Mus musculus
tgaaagctacatggctgtaaggcttaaagatgaagatctgagagattcaaggcaagaggcagcca

SEQ ID NO: 31120 - DNA, 65 bp, Mus musculus
ccatgccagcaaaagtgcccacccaagagcaaataagggcttcagtagtcttcaaaaccaaaaga

SEQ ID NO: 31121 - DNA, 65 bp, Mus musculus
gctgaccaggtaccgtagtgaaaagatgaccttgagttatgctgaataccttgctcatcgccagc

SEQ ID NO: 31122 - DNA, 65 bp, Mus musculus
tggtgctcctagtgtttggctagaacagtggcttctacgcaatcctgtgcatatgggcatataaa

SEQ ID NO: 31123 - DNA, 65 bp, Mus musculus
catcctaagttgcatgacagcgtccatacatctcagagtcggaagcctcctggtttcctgaggaa

SEQ ID NO: 31124 - DNA, 65 bp, Mus musculus
ctgatcaaacgcgatgcctgcttcacatctcttatgaacaccctgatgacgtcactgccctcact

SEQ ID NO: 31125 - DNA, 65 bp, Mus musculus
gtggaaagatcatgatcattttaacaaatgaatgaaaattatttgacagaatgaagactgaatac

SEQ ID NO: 31126 - DNA, 65 bp, Mus musculus
tatttccccatttctgagatgtaccccatcagaccatgggtaagcgaatacctgctttgcatggt

SEQ ID NO: 31127 - DNA, 65 bp, Mus musculus
aattccccaggacgtcagtgggacctcacaggagcatgcggttcaagaaacagaccacttttcaa

SEQ ID NO: 31128 - DNA, 65 bp, Mus musculus
agacatgttgtggcagtattgccagagattgacccggttttgttccaaggggagcttggcctccc

SEQ ID NO: 31129 - DNA, 65 bp, Mus musculus
gcaggagcaacacaatcggaagctgcaggaacagtgggaggaactgtccagtcagcttttctact

SEQ ID NO: 31130 - DNA, 65 bp, Mus musculus
tagcgtgagctttactgagagctgcaggagtaaggacaggaaggtgctgtacacaggagtagaac

SEQ ID NO: 31131 - DNA, 65 bp, Mus musculus
ccttcatcatcctgctcaagaatcagatcaacctcctgggcttcaccctgatgttctggtgtgaa

SEQ ID NO: 31132 - DNA, 65 bp, Mus musculus
agtctgtgacttctggcaagctgaggcgatgcctggaatgtggttagtattcctggattgaaatg

SEQ ID NO: 31133 - DNA, 65 bp, Mus musculus
cccctctggctccaattcacactcctgagctctaaggatcacagagctgtcgtctctgtagccag

SEQ ID NO: 31134 - DNA, 65 bp, Mus musculus
cactaatgaccccaatgatctcagccgcacttaatcctcagtatccttctctgccaaacccgggt

SEQ ID NO: 31135 - DNA, 65 bp, Mus musculus
gtccggggttggcgtgttccggcggtaggaatgggtgaatttaagtcatcgagtactttctttaa

SEQ ID NO: 31136 - DNA, 65 bp, Mus musculus
ttggctgccctgaggttcatccggggcattggtggccatgacaacatttctgctcgcaaattctt

SEQ ID NO: 31137 - DNA, 65 bp, Mus musculus
gaccctccgtagtcaccgagtgcgaagttatctgacactctgattaggactgctagtagttcatg

SEQ ID NO: 31138 - DNA, 65 bp, Mus musculus
ttatggaaaccagggcagtggctatggcgggagtggcagctatgacagctataacaacggaggag

SEQ ID NO: 31139 - DNA, 65 bp, Mus musculus
gcagttgtgccccatgtaccagtctacactcttcattaagccctgatgtttaccatgagaatcca

SEQ ID NO: 31140 - DNA, 65 bp, Mus musculus
tacagtacggatggagatgcaccactaatgagaactcctattcgaaccgtaccctggtaggaaac

SEQ ID NO: 31141 - DNA, 65 bp, Mus musculus
cacatcccattttcattatgctatgccaaatcttctcaccaaggttcttagcacagtgcacccgt

SEQ ID NO: 31142 - DNA, 65 bp, Mus musculus
ttgtaaaaccgccggtgttggagaaatcccgcgctttgggaccctattcccctttggggagaagg

SEQ ID NO: 31143 - DNA, 65 bp, Mus musculus
ttgtgttcctgtctgttcctgctccagctgtggaggctgtggctccagctgtggtggatgtggca

SEQ ID NO: 31144 - DNA, 65 bp, Mus musculus
catctgtctggctgatgcttaccatcctgcctctgggaagacctattacatgagcatcctttgca

SEQ ID NO: 31145 - DNA, 65 bp, Mus musculus
ggaatctttggaggaagagttggatgtgttggttttggatgatgaggggaaccaagtgtcttact

SEQ ID NO: 31146 - DNA, 65 bp, Mus musculus
aaatgatgtcagaggcaagactgaaggaatttaacagtgctttagggcatgctgtgtcctttgca

SEQ ID NO: 31147 - DNA, 65 bp, Mus musculus
ggaggctaggtacggcgacaacaggggcgtccggtcttctctgtcgctaggaagcaggcaaccgg

SEQ ID NO: 31148 - DNA, 65 bp, Mus musculus
ctcattgtaactcattggtatacactgttctacaaagaggagaaatatttcaccaccagccatga

SEQ ID NO: 31149 - DNA, 65 bp, Mus musculus
cctaccccttcaagtggaaattcctacactaagcagccttacaaaactcagtccctaagggccac

SEQ ID NO: 31150 - DNA, 65 bp, Mus musculus
gttggtgctaatgaggctagagcacagggttccactcatatataccagttaacgtggtgtagagg

SEQ ID NO: 31151 - DNA, 65 bp, Mus musculus
acgaagaccttatatactcgactcagccgccatctcagcctttcggagctgtgcggcattctgag

SEQ ID NO: 31152 - DNA, 65 bp, Mus musculus
cttcagaccgttctcccaagatgttgctgtactttgacatgccaataaagaccaaatactcaaaa

SEQ ID NO: 31153 - DNA, 65 bp, Mus musculus
cctggctctcttacactttcgcaggaattgattccgagatacctagttaaagagtgctgagggtc

SEQ ID NO: 31154 - DNA, 65 bp, Mus musculus
ttccagctgagtcacccaagaaaggacccaagaagatgacgtccggtgtcctctcacctccaaac

SEQ ID NO: 31155 - DNA, 65 bp, Mus musculus
tgggactgtgcttcaaagttagatgaagatgtggtctctgttggcagcttaatgtctccctgctc

SEQ ID NO: 31156 - DNA, 65 bp, Mus musculus
aatgagcagggacaggctggaagcaacgagaagtcatccactgactgcggagactcgatttaaga

SEQ ID NO: 31157 - DNA, 65 bp, Mus musculus
atcacaactgagcctacagaagacgccactgtaccggaatcagatgacctgtgagagggaagctg

SEQ ID NO: 31158 - DNA, 65 bp, Mus musculus
ttcatacactgggtagacggtcaggatctaagcacagcctaagctggtatttttgccaaagcttt

SEQ ID NO: 31159 - DNA, 65 bp, Mus musculus
ctgtgatgcaatttgtccaaggccatacatcttgaaggctggagaatcttgcctactagggcaag

SEQ ID NO: 31160 - DNA, 65 bp, Mus musculus
gctaacagtctttcagcaactgtaggctacggttccagtcgacagtcaagaataacagagccctg

SEQ ID NO: 31161 - DNA, 65 bp, Mus musculus
taagtgaaagcaagaagtcagtgccgagtgtcttcctcggtcactcgaactgggtggaatttccc

SEQ ID NO: 31162 - DNA, 65 bp, Mus musculus
atgtggatgacacttgttctcctgacccgtggtgttgcagtctgttgtcaccagccttgttttag

SEQ ID NO: 31163 - DNA, 65 bp, Mus musculus
gaaaagaatcatttccagcattggggacacagagaccagccagtctctgttttccaagtgtaggg

SEQ ID NO: 31164 - DNA, 65 bp, Mus musculus
cccattggctggactccggtgatgacacaggcgtgacttgcacaaataaatgcataaccactatg

SEQ ID NO: 31165 - DNA, 65 bp, Mus musculus
agccaaatgatgatgagcagggcacagcagaatagtggaccaaacatagggctggtagagtttgg

SEQ ID NO: 31166 - DNA, 65 bp, Mus musculus
cttctccctgtgtgatgatggcttccatccctgatagtccgtctgaggaagcttccatcaaatga

SEQ ID NO: 31167 - DNA, 65 bp, Mus musculus
tctgttcccagtctgttcccagtctgttcccagctggtccccagccttcccccggcttcacccca

SEQ ID NO: 31168 - DNA, 65 bp, Mus musculus
ctgggcagctctgaaatctcctgctcagtaactggcacattcattggaaaactccatttcttcgg

SEQ ID NO: 31169 - DNA, 65 bp, Mus musculus
aggccatgtgctcgcagctccgcggacgtccccggctccccgccgtctccccgcgatcggactcg

SEQ ID NO: 31170 - DNA, 65 bp, Mus musculus
cgattcagtgtgtgaggtacgatactggctttcggcttaagacgtctataggtagtgtgaccgcc

SEQ ID NO: 31171 - DNA, 65 bp, Mus musculus
tctagagtctcctagagggtcgaaaggctccaacgacgtggatctcttgaggtgtacagaggtcg

SEQ ID NO: 31172 - DNA, 65 bp, Mus musculus
agtgtctctgcggtacaaagatgcacttttcttcatggggcaaagtctgcctcttctgccaggca

SEQ ID NO: 31173 - DNA, 65 bp, Mus musculus
tgagctgagcagcacgccttagtggtcagtttcacgccttagatgagtcatgttccattaagggc

SEQ ID NO: 31174 - DNA, 65 bp, Mus musculus
agacctgtgcagtgggtattgccctacacctcactaactctctcaagccagctactacttcggat

SEQ ID NO: 31175 - DNA, 65 bp, Mus musculus
gtcgggtttgaggccctgcgagagacctcccagccattttacttgcttccctatggaattcggaa

SEQ ID NO: 31176 - DNA, 65 bp, Mus musculus
agggcgtggtgcggagggcggtaccaggcaaggttagtggctattgaaaataccaccaggacagg

SEQ ID NO: 31177 - DNA, 65 bp, Mus musculus
ggagggcggtacatatggcttaactaatttcatatagtcatgtaaagtcacagttgagttaattg

SEQ ID NO: 31178 - DNA, 65 bp, Mus musculus
caactggtgctataaacaccaagtgctattgctcacagagacccatgaaggtaggtggaggagag

SEQ ID NO: 31179 - DNA, 65 bp, Mus musculus
gcatgcattacctcacaaactttccacaagcaatgacacaccatggaatctctcccatagcaacc

SEQ ID NO: 31180 - DNA, 65 bp, Mus musculus
agctaaacttgaggtttaagattgagtattcatctaccccacagagtagtccaagtaaatgtggg

SEQ ID NO: 31181 - DNA, 65 bp, Mus musculus
atcccacgctgctaaccggaacctatcgggtgcagatgaaccatgctcaggagaggattactctt

SEQ ID NO: 31182 - DNA, 65 bp, Mus musculus
gatggtgatacttctgtggatctgaggcaacttttgaggtcaagttctccgtaaaccgctctaaa

SEQ ID NO: 31183 - DNA, 65 bp, Mus musculus
ctccgtggcagcagccggttgcagttgccggagagaagcttctaccgacagtcgtcagggccgca

SEQ ID NO: 31184 - DNA, 65 bp, Mus musculus
ttgcgcgagttgacttcaactgttaaagactcgaataacgagtggaagatacaagaagcgcagcc

SEQ ID NO: 31185 - DNA, 65 bp, Mus musculus
caaggctatcttgccacatgtgctcctgtcaccatcgacaaactgaagaataggttctttctaga

SEQ ID NO: 31186 - DNA, 65 bp, Mus musculus
gggactgcatgtaatgagcctgagaccctttcttgacctgtaaggcctcatcaaggtatagacag

SEQ ID NO: 31187 - DNA, 65 bp, Mus musculus
acaggtgagtgtctgaggtagggtgagccttctcactctgttcccatgcctgtcctcttgagtga

SEQ ID NO: 31188 - DNA, 65 bp, Mus musculus
gagccaggtgtttgggtcccaggagacactgcaggcccccggagaagcactgaagctgaggaccc

SEQ ID NO: 31189 - DNA, 65 bp, Mus musculus
aaaacctgtattctcctgttgggcagctgagagccaggtccagcatccggtaaagctgtcaataa

SEQ ID NO: 31190 - DNA, 65 bp, Mus musculus
gccttctcgatgaggacaaacagaaccagatgattcgtgacctccagcagcagatcttagagcaa

SEQ ID NO: 31191 - DNA, 65 bp, Mus musculus
gttcagtactcacatcatccaggacctacttcatgtcctgatatctagctcatcgaacagctgct

SEQ ID NO: 31192 - DNA, 65 bp, Mus musculus
cttcaaatacctgctcaagtggccagatgtgaggcagctcttcgaactgtgtggaaccaatgaga

SEQ ID NO: 31193 - DNA, 65 bp, Mus musculus
gaacttatcagatgccctaggctgaaggtaccatagacactatgacagaaaggaacaaaactgtc

SEQ ID NO: 31194 - DNA, 65 bp, Mus musculus
gatactggccatttgctctctactgatttgctgtgatcccccaggcacagttccatctcttcatg

SEQ ID NO: 31195 - DNA, 65 bp, Mus musculus
taaagtgaggtgtggctccacgctaccacttgcctaacacgcatgacgcccaaggtttccgttcc

SEQ ID NO: 31196 - DNA, 65 bp, Mus musculus
cttagaaatggagcacaaggttcaagggtgttagctcggctgtttgaaagccctgctaagctgtt

SEQ ID NO: 31197 - DNA, 65 bp, Mus musculus
ccttcacagcattgcgaagccacaacagaatgctttcttttgagaacagatttcccaaaatgtca

SEQ ID NO: 31198 - DNA, 65 bp, Mus musculus
atgttcagttgcctcatacagtgtgatagatgctaggatgtattgcttccacggtgatattttcc

SEQ ID NO: 31199 - DNA, 65 bp, Mus musculus
ctcatctattttccctttaccatgagattcaggcattccccccacctcttgttccctccttgtta

SEQ ID NO: 31200 - DNA, 65 bp, Mus musculus
ccacacccctcctgtgcccatcccctctctcacctagtcccctccctacatcctcctctaatcta

SEQ ID NO: 31201 - DNA, 65 bp, Mus musculus
ggatatgggtcaaaccagaaccttaagcagcaccacctaacatttagagactagaatcgagatag

SEQ ID NO: 31202 - DNA, 65 bp, Mus musculus
ggctataccaaaggtaaaagttgcaatggaaccttgttgatactgcttgactccactagactctc

SEQ ID NO: 31203 - DNA, 65 bp, Mus musculus
ctttgtggagatcaaaggtgatgaccaactcagtggggctcagcagtggatgaccaagtcactga

SEQ ID NO: 31204 - DNA, 65 bp, Mus musculus; identical to SEQ ID NO: 23716

SEQ ID NO: 31205 - DNA, 65 bp, Mus musculus
tgggtccgtgaactagtggactgctttgagcgcaaagagtgtggaactggtcatgggaagagttt

SEQ ID NO: 31206 - DNA, 65 bp, Mus musculus
agtgcttggcttaagtcttcacgggggtttatgcagggctatcttagggaccctgtgtaccatgt

SEQ ID NO: 31207 - DNA, 65 bp, Mus musculus
gtacacttgtacctcaccactgatggccaccaaaggaccgtgcactaaccagctgtgtcactgga

SEQ ID NO: 31208 - DNA, 65 bp, Mus musculus
atcctagcatccgaggaccccaaaaagaagcgagctcagaagccctctcacatgagaagaaacat

SEQ ID NO: 31209 - DNA, 65 bp, Mus musculus
tctcacggggtaaaatggaacaacctaagtaacggtataggtggcttcatatgtcacaggctggc

SEQ ID NO: 31210 - DNA, 65 bp, Mus musculus
gagtctgaagctctcgatttcctatcagtaacagcatctaagaggttttgctcagtggaataaac

SEQ ID NO: 31211 - DNA, 65 bp, Mus musculus
caaaacctgccacaacagaatcaagagaaatgctgacactccaatcctctggtacaggacagagg

SEQ ID NO: 31212 - DNA, 65 bp, Mus musculus
ctagttctgctgctttagctcagtggcagagttcttaacatgcccatgcgtgtcaccacacacat

SEQ ID NO: 31213 - DNA, 65 bp, Mus musculus
gaaccagcgtcagcttgtgttctggtgagcaatgaagtgtcaggccagtggaatcctctaaaagt

SEQ ID NO: 31214 - DNA, 65 bp, Mus musculus
ccatgttttcttcacccgatctgtaatgtgaccagtggacaacctgcctgagtgcatcctcagta

SEQ ID NO: 31215 - DNA, 65 bp, Mus musculus
gcccgagactataatcttgctgctgtaaaggggctctagagaatgggtcttgttccattgttcag

SEQ ID NO: 31216 - DNA, 65 bp, Mus musculus
ccaaaggcaaacatgtgttccctgaacaggaaacagagaaggtctgggatactagagccctggag

SEQ ID NO: 31217 - DNA, 65 bp, Mus musculus
tctacgtcatgatctgccagcaccaagaaattcagagtcctggtggaaagcgaacgaggagagga

SEQ ID NO: 31218 - DNA, 65 bp, Mus musculus
tgctgctacccagccccacactatgccccagctcggcaggatcaggagtgccaggttagcatgct

SEQ ID NO: 31219 - DNA, 65 bp, Mus musculus
ttcacttctagaggtggcccctgatttccccaagcctcactcaggacagaaggcaccattcagtt

SEQ ID NO: 31220 - DNA, 65 bp, Mus musculus
ggatgtggcagtggagaacactacaagtcttggttgtgagtctctcacttctggaaggaagcaga

SEQ ID NO: 31221 - DNA, 65 bp, Mus musculus
agggttgcattccctttccagtatggtccatggaaaacatgcagaggaaatggccccacagcatt

SEQ ID NO: 31222 - DNA, 65 bp, Mus musculus
cagatttagagggattgaactcagctccttttaggttgccctactaactggacattgtggacact

SEQ ID NO: 31223 - DNA, 65 bp, Mus musculus
ggtaggtttcccgagctcaactgcatagtctcaaaaggaccgggatgttgcccaactcatctata

SEQ ID NO: 31224 - DNA, 65 bp, Mus musculus
tacaacgaggtggaggaatatcacatggtgagagtcagtatgcaaagcaggcatggtgggactct

SEQ ID NO: 31225 - DNA, 65 bp, Mus musculus
ggcagcacatatactaaaattggaacgatacagagaagatttagcatggcccctgcgcaaggatg

SEQ ID NO: 31226 - DNA, 65 bp, Mus musculus
atcatcacagtcatagacactgagacggttggagagggccaggtgcttgtaagtgaggactcgga

SEQ ID NO: 31227 - DNA, 65 bp, Mus musculus
cagcattgccatcattactgcccagaacctcagttgtgataaggaagggcaaacggaggaatgaa

SEQ ID NO: 31228 - DNA, 65 bp, Mus musculus
cagcccatggctagtcacttcttctgactcatggtccttctgcctggtgctctctttgcagcatc

SEQ ID NO: 31229 - DNA, 65 bp, Mus musculus
agcgcgtctcaccagagcccttccatactctgtgactctcagtgtgaatcggaatgcaattcttt

SEQ ID NO: 31230 - DNA, 65 bp, Mus musculus
ctgtgtcttgcttttgtaagccttgttaaccctttccatgcccattggagattcccttgcctaga

SEQ ID NO: 31231 - DNA, 65 bp, Mus musculus
gagaagaagatcctgctgtggtcaggccgcttcaagaaggaggaagagatcccagagacaatctc

SEQ ID NO: 31232 - DNA, 65 bp, Mus musculus
agcctggctctcactgtcccggtacaccctaaacccatggatcggccatttatccctgtggttat

SEQ ID NO: 31233 - DNA, 65 bp, Mus musculus
ttcttgttgaggcagagctagttatgaaggcaggaacaaaggagtgcccgcaatcctggccttgt

SEQ ID NO: 31234 - DNA, 65 bp, Mus musculus
ggcgccaggatgccacccgcccggctgtcggcatcatggtgcaccatcaggactgagcttgcgcg

SEQ ID NO: 31235 - DNA, 65 bp, Mus musculus
tagacacttggatgaggctgacccctactggatcaactgaggattaaggagtgggttctggatcc

SEQ ID NO: 31236 - DNA, 65 bp, Mus musculus
cccgatgagcagttcacgagagttggtgtccaggttttagatcgaaaggacggttccttcatagt

SEQ ID NO: 31237 - DNA, 65 bp, Mus musculus
cgcatagagacttactgggaaatagaccctgcagttacctagaatgggtaccagagagatgatgc

SEQ ID NO: 31238 - DNA, 65 bp, Mus musculus
gtcttcaccagcaactggaagtgatcccgggctatgaggagctgctggcagacattgtcaacatc

SEQ ID NO: 31239 - DNA, 65 bp, Mus musculus
tgatatcaacagccaaggagaagagtccctgggaaacgccgagccccttaggaaacccatcaaaa

SEQ ID NO: 31240 - DNA, 60 bp, Homo sapiens
tttacaatcagccacattctaggtaggggcccacttcaccgtactaaccagggaagctgt

SEQ ID NO: 31241 - DNA, 60 bp, Homo sapiens
ggccttgaaaccaccttttattacatggggtctagaacttgacccccttgagggtgcttg

SEQ ID NO: 31242 - DNA, 60 bp, Homo sapiens
tggtcggtgggttggtagtttctacagttgggcagctggttaggtagagggagttgtcaa

SEQ ID NO: 31243 - DNA, 60 bp, Homo sapiens
tgcaacctgtatgcccagatgcatgggctgcctggctcacaggactggactgcactcagg

SEQ ID NO: 31244 - DNA, 60 bp, Homo sapiens
tgacccccaacagatggcccccatctttgctagtaatctagagctggcttcggcttctgc

SEQ ID NO: 31245 - DNA, 60 bp, Homo sapiens
tgagtttggccctgagcagcagaaggaactgaacaaagccctggaagtctggagtgtggg

SEQ ID NO: 31246 - DNA, 60 bp, Homo sapiens
aaggaggagcccaagtacagcatccacattgaccagatgccgcagacccgcctcatccac

SEQ ID NO: 31247 - DNA, 60 bp, Homo sapiens
aagaacgagaatgtcgccaccttgtctgtgagctccctggagcggcggaagtcgcggtat

SEQ ID NO: 31248 - DNA, 60 bp, Homo sapiens; identical to SEQ ID NO: 21132

SEQ ID NO: 31249 - DNA, 60 bp, Homo sapiens
ggagggaaacgaaaatacaaaacacggcatttggagggtactaacgaagtggctcagcca

SEQ ID NO: 31250 - DNA, 60 bp, Homo sapiens
tgacaatagtggtcctcaagaccctctacaaaatgagtttttggctccttccttggaacc

SEQ ID NO: 31251 - DNA, 60 bp, Homo sapiens
atttggagaaccagcccagtaacattgtgtctcttcaaactgagccatcaaggcaattgc

SEQ ID NO: 31252 - DNA, 60 bp, Homo sapiens
gcatggtttgcaatgcaggaggacctactaatcttgaaagggacatgttacccgatgaag

SEQ ID NO: 31253 - DNA, 60 bp, Homo sapiens
gaggaggagcttccagaaggaactgtgaggctgggggtatcaaaactgttgctgagtttt

SEQ ID NO: 31254 - DNA, 60 bp, Homo sapiens
atgttgctctccattattcccttctaagccagagacccttatccactgctcctctaggtg

SEQ ID NO: 31255 - DNA, 60 bp, Homo sapiens
ggttgcagatctagtgaatgctcagaaagacagtatgccagatgagtcaagtcagacttc

SEQ ID NO: 31256 - DNA, 60 bp, Homo sapiens
cagaaagagattagtactgaagagcagctaaggcgcctgcaagaggagaagctttgcaaa

SEQ ID NO: 31257 - DNA, 60 bp, Homo sapiens
aacaatgtgctgaagcagttgacaagtgtcccatgtgctacacagtcattactttcaagc

SEQ ID NO: 31258 - DNA, 60 bp, Homo sapiens
gttttagtaacagactggctccaacactgcaacatggggacatttgccaactcgaacaaa

SEQ ID NO: 31259 - DNA, 60 bp, Homo sapiens
ggctgagaagcagccacaccgttgtttagggtagaataggctgtgtatttacatgaatgt

SEQ ID NO: 31260 - DNA, 60 bp, Homo sapiens
atatctatgtcagcagtattggctgagtccattagctctccagttggtttaatgattggg

SEQ ID NO: 31261 - DNA, 60 bp, Homo sapiens
gtctcttcaagcatcctcagaagcctcgactgagctttagacagcagagcagatgccgca

SEQ ID NO: 31262 - DNA, 60 bp, Homo sapiens
aactgtgacaatcttttgggttgattctcgactgcttttcgagcatgcggagccagcagg

SEQ ID NO: 31263 - DNA, 60 bp, Homo sapiens
agatgcgttcgcctctggccctggggtgtgtctcggtgacgttttctatcagacgtgctc

SEQ ID NO: 31264 - DNA, 60 bp, Homo sapiens
cgtcctacagataccacaacctggatcaggtccaagcaaaacgtccagagtgctacaaaa

SEQ ID NO: 31265 - DNA, 60 bp, Homo sapiens
gtattctcatcaagaaacttctacgacagcaaattgccccggatgtggatacctataagg

SEQ ID NO: 31266 - DNA, 60 bp, Homo sapiens
ttgttgcggagttcataatgaataacacaggagaatggataaggcaaaacggaggctggg

SEQ ID NO: 31267 - DNA, 60 bp, Homo sapiens
ggagaaaacgtcattggcggcaatgccacggaaagaaaagcatatagagcctgaggttcc

SEQ ID NO: 31268 - DNA, 60 bp, Homo sapiens
accactcaccgagggcccccgagtcatcttcattaagccctaccgcaatagaactcccat

SEQ ID NO: 31269 - DNA, 60 bp, Homo sapiens
ctgctccgcatcacttgaaatgcctatgtggcatccatacaaggttgatgtgacctggac

SEQ ID NO: 31270 - DNA, 60 bp, Homo sapiens
ttatgtggttaagagcatggggcgaggggtcagacatgagtctaaggttctgcccttact

SEQ ID NO: 31271 - DNA, 60 bp, Homo sapiens
gggctaatgtcaggagctgatttttaatgataaagctgcagatgggctaaataaaagcca

SEQ ID NO: 31272 - DNA, 60 bp, Homo sapiens
ggcacagaattgaaatctctttgtttcccaccatttccctttaagtgctctgctcctttg

SEQ ID NO: 31273 - DNA, 60 bp, Homo sapiens
tggttaaagagacccggaaacggctcacaatccaagaggctctcagacacccctggatca

SEQ ID NO: 31274 - DNA, 60 bp, Homo sapiens
aagctttccttcagcatcgtgtccctgtgcaaccacctcacccgctcgctgatgaagaag

SEQ ID NO: 31275 - DNA, 60 bp, Homo sapiens
gattgtatgttccaggcctcaatgaggagtccaaacatggagccattcaagcagcagaag

SEQ ID NO: 31276 - DNA, 60 bp, Homo sapiens
atgttgcacctgtaaccatctttttatgggtggagcagagagtcaatccctgcagccacc

SEQ ID NO: 31277 - DNA, 60 bp, Homo sapiens
tggccaaacaagttctatcagggtctggagaatctgtcaccaagctcaccttggctgacc

SEQ ID NO: 31278 - DNA, 60 bp, Homo sapiens
tcagagtcctttttggcatctaacctcctgtggataagggctcagaatagcaccattgct

SEQ ID NO: 31279 - DNA, 60 bp, Homo sapiens
cctttacccaccagagacagtacagaatccctgccctaaaatcccaggcttaattgccct

SEQ ID NO: 31280 - DNA, 60 bp, Homo sapiens
cagccttttgaagatgtcaccaatcctttgcagataatgtatagtgtgtcacaaggacat

SEQ ID NO: 31281 - DNA, 60 bp, Homo sapiens
cgacctgttattaatgaagaaagtttgccatatgatatacctcaccgagcacgtatgatc

SEQ ID NO: 31282 - DNA, 60 bp, Homo sapiens
gaagcgcatcattgactcagcccggtcagcctaccaggaggccatggacatcagcaagaa

SEQ ID NO: 31283 - DNA, 60 bp, Homo sapiens
acctggggctggggatcccactcttcttgcagctgttgagcgcacctaaccactggtcat

SEQ ID NO: 31284 - DNA, 60 bp, Homo sapiens
gagggaaagcatgtctgctgggtgtgaccatgtttcctctcaataaagttcccctgtgac

SEQ ID NO: 31285 - DNA, 60 bp, Homo sapiens
cagcagctttctagggacagctggaaaggacttaatgtgtttgactatttcttacgaggg

SEQ ID NO: 31286 - DNA, 60 bp, Homo sapiens
aatatttagtgggagaccataatgtgtcagccaccttgataaatgacagggtggggaact

SEQ ID NO: 31287 - DNA, 60 bp, Homo sapiens
ggattgaaatgcaagcaattagtggatcactgttagggtaagggaatgtatgtacacatc

SEQ ID NO: 31288 - DNA, 60 bp, Homo sapiens
agcacactggccacacccaagcgcagcggcaacaacaacggctcagagcccagtgacatt

SEQ ID NO: 31289 - DNA, 60 bp, Homo sapiens
atcatcccgctaaggactgcggacagcgtcttctgccctcactacgagaaggtcagcggg

SEQ ID NO: 31290 - DNA, 60 bp, Homo sapiens
ctaatgtcccgatgcctcccttgagggtttgagagcccgcgtgctggagaattgactgaa

SEQ ID NO: 31291 - DNA, 60 bp, Homo sapiens
gtggggaaggggtggagctgggggcagggcagcacagggaatatttttgtaactaactaa

SEQ ID NO: 31292 - DNA, 60 bp, Homo sapiens
ctgctgtggttggagcgaatggaagttgggtgattttaagttattgttgccaaagagatg

SEQ ID NO: 31293 - DNA, 60 bp, Homo sapiens
tctgaggtctgccgatgataaagtcctggacaggaggggctgtgcaggaacccgatgcca

SEQ ID NO: 31294 - DNA, 60 bp, Homo sapiens
catgttagctttgaagtggatcctaccaggttagaaccatcagagagccttgaggaaaac

SEQ ID NO: 31295 - DNA, 60 bp, Homo sapiens
cagcggaacctccttcagatgactgaaaagttcttccatgccatcatcagttcctcctca

SEQ ID NO: 31296 - DNA, 60 bp, Homo sapiens
ggaataagatggtagaatacctgacagactgggttatgggaacatcaaaccaagcagcag

SEQ ID NO: 31297 - DNA, 60 bp, Homo sapiens
ttactgtggatgataatccgaccaagccaaccacccggcaaagatacgacggcagcacca

SEQ ID NO: 31298 - DNA, 60 bp, Homo sapiens
gctaattcaggaatagggttcgaaaccgccaagtcttttgccctccatggtgcacatgtg

SEQ ID NO: 31299 - DNA, 60 bp, Homo sapiens
tcttggcctgcaggaacatggcaagggcgagtgaagcagtgtcacgcattttagaagaat

SEQ ID NO: 31300 - DNA, 60 bp, Homo sapiens
tctcacactggcgtagaagtttttgtactgtaaagagacctacctcaggttgctggttgc

SEQ ID NO: 31301 - DNA, 60 bp, Homo sapiens
caaaccccctttgtgctgtggggctggtagctcaggtgggcgtggtcactgctgtcatca

SEQ ID NO: 31302 - DNA, 60 bp, Homo sapiens
ggtcagcgttgcatgtcgtgaccaactagacattctgtcgccttagcatgtttgctgaac

SEQ ID NO: 31303 - DNA, 60 bp, Homo sapiens
gtttctccacctagactgtaaacctctcgagggcagggaccacaccctgtactgttctgt

SEQ ID NO: 31304 - DNA, 60 bp, Homo sapiens
tagcagcggaacaaggagtcagacattttaagatggtggcagtagaggctatggacaggg

SEQ ID NO: 31305 - DNA, 60 bp, Homo sapiens
catgccacgtgggctcatatggggctgggagtagttgtctttcctggcactaacgttgag

SEQ ID NO: 31306 - DNA, 60 bp, Homo sapiens
agggcctttccgctttgtggatctgtatggcgcccagaagatagtggaccggctcaagaa

SEQ ID NO: 31307 - DNA, 60 bp, Homo sapiens
atatgaagctgcctatggaaaacagttcaccccatgccagctgctagctgaccatgctaa

SEQ ID NO: 31308 - DNA, 60 bp, Homo sapiens
cagccctaacaagaagttctaccagtgagcaggcctcatgcctcgctcagtcagtgcact

SEQ ID NO: 31309 - DNA, 60 bp, Homo sapiens
tcttcttaagcaacagactcttccacaagacagtctacctgcagtcggccctgagcagct

SEQ ID NO: 31310 - DNA, 60 bp, Homo sapiens
aagttcccttcaccgcatccgtcgcctgccaaactgaaggctactgcaggtcactgagtt

SEQ ID NO: 31311 - DNA, 60 bp, Homo sapiens
catccaaaggggatgggcgggattggaagaagctgtggcagctcttttccctgttcacct

SEQ ID NO: 31312 - DNA, 60 bp, Homo sapiens
tacgtcactgtccccgaagggctcctcatgcctatcccagagggattgaccctgacccag

SEQ ID NO: 31313 - DNA, 60 bp, Homo sapiens
cttgtgggaaatgttcaggctggagactatgtgctaatccatgcaggactgagtggtgtg

SEQ ID NO: 31314 - DNA, 60 bp, Homo sapiens
cagctgctggattcaattacaaaaaagaggatttctctgaagcaacgctgaaattcacca

SEQ ID NO: 31315 - DNA, 60 bp, Homo sapiens
aatccagtaacagggcgaccgctcgttaacatatacaactgctctggggtgcaagttgga

SEQ ID NO: 31316 - DNA, 60 bp, Homo sapiens
acaacaactacttgactatgcaacagacaactgccttgcccacatggggcttggcacctt

SEQ ID NO: 31317 - DNA, 60 bp, Homo sapiens
ccctaaagatcctgaagcctggagcaggccacagggttggtataatcatagcgggaaata

SEQ ID NO: 31318 - DNA, 60 bp, Homo sapiens
ctcagacgtcaggagagtgatgtgagggagctgtgtgaccatagaaagtgacgtgttaaa

SEQ ID NO: 31319 - DNA, 60 bp, Homo sapiens
aaccagcgctgccctctttgaaagccagggagcatcattcatttagcctgctgagaagaa

SEQ ID NO: 31320 - DNA, 60 bp, Homo sapiens
ctctctgcggccccaagtgttcgtggtgcttccagaggcagggctatgctcacattcatg

SEQ ID NO: 31321 - DNA, 60 bp, Homo sapiens
gagactgctaagtaggggcagtgatggttgccaggacgaattgagataatatctgtgagg

SEQ ID NO: 31322 - DNA, 60 bp, Homo sapiens
cagaattgccaaggcagcgggatctcgtatctttaaaaagcagtcctcttattcctaagg

SEQ ID NO: 31323 - DNA, 60 bp, Homo sapiens
atttgaacccccgccatccttcaccagagcccatgctcaaccactgtggcgttctgctgc

SEQ ID NO: 31324 - DNA, 60 bp, Homo sapiens
ccatatacctgccctggttcgtagcaatgccttctcagagaattttttagaggtttcagc

SEQ ID NO: 31325 - DNA, 60 bp, Homo sapiens
tagctcgagagaatgtccaaggtgtagtcataccctcaaaagatccagaaccacttgaag

SEQ ID NO: 31326 - DNA, 60 bp, Homo sapiens
cccagaccaatggcattattaggtcttaaagtagttactcccttctcgtgtttgcttaaa

SEQ ID NO: 31327 - DNA, 60 bp, Homo sapiens
gagaccacatccatggtttctatgcccctctatgcagtcatgtatcctgtgtttaatgag

SEQ ID NO: 31328 - DNA, 60 bp, Homo sapiens
cacggagtcccttcttcgtatggcagctgatgatgtagaagagtatatgattgaacgacc

SEQ ID NO: 31329 - DNA, 60 bp, Homo sapiens
tccaagacctaaacgaaaaggcacgagcacttaaacaaattctcagtaagatcccagatg

SEQ ID NO: 31330 - DNA, 60 bp, Homo sapiens
tgacagcccagcagatgttgcaggacagtaagaccaagattgacatcatccgcatgcaac

SEQ ID NO: 31331 - DNA, 60 bp, Homo sapiens
cccggaccgcaaggcagtcagcgaggcccaggagaaattgacagaatccaaccagaagct

SEQ ID NO: 31332 - DNA, 60 bp, Homo sapiens
tggccggagcagcctcaaagcagaagccgagaacaccagtgaagtcagcactgtgcttaa

SEQ ID NO: 31333 - DNA, 60 bp, Homo sapiens
ccaggaagagacaggaaggcggatgaagatagcatcagaaagcagcaagtttcggacagt

SEQ ID NO: 31334 - DNA, 60 bp, Homo sapiens
agaacggtgatggtacgaagcgcccgtttcgtcagaacacacatggtatccagatgacat

SEQ ID NO: 31335 - DNA, 60 bp, Homo sapiens
ccatcaagaaacgaagatccccagatgatgaactgttatacttaccagtgaggggccgtg

SEQ ID NO: 31336 - DNA, 60 bp, Homo sapiens
gaaggagtacaccatcaagtcgcactccagcttgccgcccaacaacagctacgccgactt

SEQ ID NO: 31337 - DNA, 60 bp, Homo sapiens
ttctctacacagcctctacgctggccttcaccttcacccctgcatcgtcggtgaccctgg

SEQ ID NO: 31338 - DNA, 60 bp, Homo sapiens
atcgtcgcgcctgtggacgcctaggcaagagcggccctctgcagccaagagaaataaaat

SEQ ID NO: 31339 - DNA, 60 bp, Homo sapiens; identical to SEQ ID NO: 13797

SEQ ID NO: 31340 - DNA, 60 bp, Homo sapiens
aggtaggaaggcacactgcccaggaaaaaaatcaatcctccgcccaaggtacagcagaag

SEQ ID NO: 31341 - DNA, 60 bp, Homo sapiens
ggctgcctgggcctgttcacgtgttttccatcccacataaatacagtattcccactctta

SEQ ID NO: 31342 - DNA, 60 bp, Homo sapiens
cctgtggttgacctatacgaccaggatgtagaaaactagaaagaactgcccttcctcaga

SEQ ID NO: 31343 - DNA, 60 bp, Homo sapiens
gaggtcaggcttcagtaactgtagtcttgtgagcatattgagggcagaggaggacttagt

SEQ ID NO: 31344 - DNA, 60 bp, Homo sapiens
gtctaggaaattgagattttgatacacctaaggtcacgcagctgggtagatatacagctg

SEQ ID NO: 31345 - DNA, 60 bp, Homo sapiens
agtttatacacaatggcacctatatctgtgatgtcaaaaaccctcctgacatcgttgtcc

SEQ ID NO: 31346 - DNA, 60 bp, Homo sapiens
aaaaagagaatttgcctgtgtttccagtttgggtagtggtgggcatagttactgctgtgg

SEQ ID NO: 31347 - DNA, 60 bp, Homo sapiens
tcctaggtctcactctgctcatcagcatgattctggctgtcctctatagaaggaaaaact

SEQ ID NO: 31348 - DNA, 60 bp, Homo sapiens
ctgaaggaattctttgccaaggcacgggctggctctgtgcggctcatcaaggttgtgatt

SEQ ID NO: 31349 - DNA, 60 bp, Homo sapiens
ctgctacctgctctaccgcctcgactcacagaatgctcagggcttcgaatggctcttcct

SEQ ID NO: 31350 - DNA, 60 bp, Homo sapiens
cacatcaaggatgagctcttcgggactgtgaaggatgacctctcttttgctgggtaccag

SEQ ID NO: 31351 - DNA, 60 bp, Homo sapiens
ctcagaaaagctatgtgaacacaatggaccttgagagagatgaacctctcaaaagcaccg

SEQ ID NO: 31352 - DNA, 60 bp, Homo sapiens
gccctcagatttctgttagtgaattttcttgccactgctgctacgacatcctggttaacc

SEQ ID NO: 31353 - DNA, 60 bp, Homo sapiens
ccgtcactgccttgctttatggtgggcatcttcaaagaaaacagaatgtccagaatgcag

SEQ ID NO: 31354 - DNA, 60 bp, Homo sapiens
ccggagaggacagtggattgtttatactccagtgtacatagtgtaatgtagcgtgtttac

SEQ ID NO: 31355 - DNA, 60 bp, Homo sapiens
ctatgttgtggtccatcagcccctcacattcctaggggtttgagatgctgtaggtggtat

SEQ ID NO: 31356 - DNA, 60 bp, Homo sapiens; identical to SEQ ID NO: 7350

SEQ ID NO: 31357 - DNA, 60 bp, Homo sapiens
ggaagtggaagagcttatactaactgaatccaaaaaggtcctagaagatgtgactggtga

SEQ ID NO: 31358 - DNA, 60 bp, Homo sapiens
gtctgggttaaaaagcttacagacagtgagtggaagacagcaacttgtagagttggtggc

SEQ ID NO: 31359 - DNA, 60 bp, Homo sapiens
tgaacaggccgacctagaacagaccttcaatccctcggatcctgactgtgtggacaggct

SEQ ID NO: 31360 - DNA, 60 bp, Homo sapiens
cctcttggaattacaagccctggggtttgaagctgactttatagctgcaagtgtatctcc

SEQ ID NO: 31361 - DNA, 60 bp, Homo sapiens
ttttatctggtgcctcctcaaacccagtctcagacactaaatgcagacaacaccttcctc

SEQ ID NO: 31362 - DNA, 60 bp, Homo sapiens
gagcaccgtgatggagaggacagagcaggggctccagcaccttctttctggactggcgtt

SEQ ID NO: 31363 - DNA, 60 bp, Homo sapiens
gctagtggaaagacctatgtaacacaaacgttgttgaaaactttagagctcccacatgtg

SEQ ID NO: 31364 - DNA, 60 bp, Homo sapiens
gtgaacccgtggttaaaggagaagcaagtgaacgtgatactcgcaaactgtggagaaata

SEQ ID NO: 31365 - DNA, 60 bp, Homo sapiens
atcaagttcccagtgggaaaagctacagaaagatgacacagatccggggcaactgaaagg

SEQ ID NO: 31366 - DNA, 60 bp, Homo sapiens
cctaaagtgacacaggtttatgcagaaaatggcacagtgttgcaaggcagtacagttgcc

SEQ ID NO: 31367 - DNA, 60 bp, Homo sapiens
gaaactgaggccattatttcaaccgcttgccatattccgaggacccagtgttcttagctg

SEQ ID NO: 31368 - DNA, 60 bp, Homo sapiens
acaatgaatgctgaccctaaatgtggacatcatgaagcatcaaagcactgtttaactggg

SEQ ID NO: 31369 - DNA, 60 bp, Homo sapiens
gggctcaggaaccagtttggacttgattttgaatcccagttcatccccttcctagctgta

SEQ ID NO: 31370 - DNA, 60 bp, Homo sapiens
ccttgattgtgtgccttaaccgctctgtgacacagtctacctgtctgcaaaatgggaaac

SEQ ID NO: 31371 - DNA, 60 bp, Homo sapiens
aattccccgacttggagaatgtggtcaagggccaccacgttagccaagaaccctggaaca

SEQ ID NO: 31372 - DNA, 60 bp, Homo sapiens
atcggagtggagttcgtggggaactgcgtggtgctctttgctgcactatttgccgtcatc

SEQ ID NO: 31373 - DNA, 60 bp, Homo sapiens
agacagtgactggtgccagtgtcatccgggcctacaaccgcagccgggattttgagatca

SEQ ID NO: 31374 - DNA, 60 bp, Homo sapiens
tcagtgatactaaggtggatgccaaccagagaagctgctacccctacatcatctccaacc

SEQ ID NO: 31375 - DNA, 60 bp, Homo sapiens
ataagcacctttcacaacctcgggaacgttcattccccgctgaagcttctcaccagcatg

SEQ ID NO: 31376 - DNA, 60 bp, Homo sapiens
cacatgtgctgccctacagcaccctgtggtcttcctcgataaagggaaccactttcttat

SEQ ID NO: 31377 - DNA, 60 bp, Homo sapiens
accatcaagttgtgccaaattattctcctatgtttggctgctagaacatggttaccatgt

SEQ ID NO: 31378 - DNA, 60 bp, Homo sapiens
ggtcagtgaaaagatgctactatattgcttttgtcccaaagtgagtaaaatcccctagag

SEQ ID NO: 31379 - DNA, 60 bp, Homo sapiens
gccaaccacagcctgtttctgctgagtttcttatcagccctcaagctatgctaggaaaag

SEQ ID NO: 31380 - DNA, 60 bp, Homo sapiens
gattaggattgaacagttcagttgtatctatgccccacagtgaccagtaaagtccaatta

SEQ ID NO: 31381 - DNA, 60 bp, Homo sapiens
gaagggaactgcgcagaagaagatcagtctggctggtggtttaacaggtgtcactctgca

SEQ ID NO: 31382 - DNA, 60 bp, Homo sapiens
aacctgaatggtgtatactacagcggcccctacacggctaaaacagacaatgggattgtc

SEQ ID NO: 31383 - DNA, 60 bp, Homo sapiens; identical to SEQ ID NO: 16300

SEQ ID NO: 31384 - DNA, 60 bp, Homo sapiens; identical to SEQ ID NO: 14689

SEQ ID NO: 31385 - DNA, 60 bp, Homo sapiens
gagaaaccttccatgcatcacagccctcactcactgtagatggctttacagacccatcaa

SEQ ID NO: 31386 - DNA, 60 bp, Homo sapiens
gcttaggtttactctccaatgttaaccgaaatgccacggtagaaatgacaagaaggcata

SEQ ID NO: 31387 - DNA, 60 bp, Homo sapiens
accttgctggatgcctcggcaacactggaagaaggacatgcaaaggaaacaattcaggac

SEQ ID NO: 31388 - DNA, 60 bp, Homo sapiens
aactggtgggctccgaaaagctcttttatgaagaagatgaggcaggctctgctacgtcct

SEQ ID NO: 31389 - DNA, 60 bp, Homo sapiens; identical to SEQ ID NO: 14328

SEQ ID NO: 31390 - DNA, 60 bp, Homo sapiens
gatgaagaagttacaccagcaagagctgtatctcgtcattttgaggatactagttatggc

SEQ ID NO: 31391 - DNA, 60 bp, Homo sapiens
gacatgggatgcatgttccaacatttcgtgtccaggactattgctgggaagatcatggtt

SEQ ID NO: 31392 - DNA, 60 bp, Homo sapiens; identical to SEQ ID NO: 12876

SEQ ID NO: 31393 - DNA, 60 bp, Homo sapiens
gtataggtcagagggatataagagccagcatccatccctgggttctcagtaggaatgctg

SEQ ID NO: 31394 - DNA, 60 bp, Homo sapiens
tgtctaaagacctggcattaatggaggcggaggagcagccttacgggagggatggaggga

SEQ ID NO: 31395 - DNA, 60 bp, Homo sapiens
cagaggatagtgaacaaatctgtctttgacttacgacccattttgcaagacttaaagccg

SEQ ID NO: 31396 - DNA, 60 bp, Homo sapiens
agtcaccatggccagctccatagatcagggacacttggggaaccccgaacagagtgcaat

SEQ ID NO: 31397 - DNA, 60 bp, Homo sapiens
acaccacgggggacacgctagagaagtttgtggagggcttgtagcattgtgagagcatca

SEQ ID NO: 31398 - DNA, 60 bp, Homo sapiens
ggttctttttattcctagatggaactgcgacttccgagccatggaagggtggattgatgt

SEQ ID NO: 31399 - DNA, 60 bp, Homo sapiens; identical to SEQ ID NO: 13279

SEQ ID NO: 31400 - DNA, 60 bp, Homo sapiens
agatggacttcagcagaaatctttatgatattggggaacaactggacagtgaagatctgg

SEQ ID NO: 31401 - DNA, 60 bp, Homo sapiens
cctccctcaagttcctgagcctggactacattccgcaaaggaagcaagaacccatcaagg

SEQ ID NO: 31402 - DNA, 60 bp, Homo sapiens
aaactatgcaatggcatggctgttggtcattcacatctctctctgccaagaatggagatg

SEQ ID NO: 31403 - DNA, 60 bp, Homo sapiens
ggtctgattcctttgggtctctaataatggaaactgcaaggatcagcataaagtgttcct

SEQ ID NO: 31404 - DNA, 60 bp, Homo sapiens
ggacatgcagacagaagcaatattattcaggtcttccttgttgcaagtgagggaaatcca

SEQ ID NO: 31405 - DNA, 60 bp, Homo sapiens
attctgccacacccataaatccttgtgtgttaacttctagctgcctggggctggccctgc

SEQ ID NO: 31406 - DNA, 60 bp, Homo sapiens
tcagacaaatctgctccctgggcatctttggccaggcttctgccctctgcagctgggacc

SEQ ID NO: 31407 - DNA, 60 bp, Homo sapiens
ctgccatgctctgctcggcttcagtctccaggagacagtggtcacctctccctgccaata

SEQ ID NO: 31408 - DNA, 60 bp, Homo sapiens
gttttgttaagattgagtcatcgacattcaggatttaagtctgaggtagtcaaccctcag

SEQ ID NO: 31409 - DNA, 60 bp, Homo sapiens
caatcttcattctacagatgaactcattgaaacaatttaggggaatgaggggcaaaaggg

SEQ ID NO: 31410 - DNA, 60 bp, Homo sapiens
gtaaaaaagaaatgaaaatctgctggccagctatgtcctctaggaaatgacagacccaac

SEQ ID NO: 31411 - DNA, 60 bp, Homo sapiens
gtttgccagaatgggactgtgaactgggtactcttaccatgcagacacacatgcctgtgt

SEQ ID NO: 31412 - DNA, 60 bp, Homo sapiens
gatggctgtgtgaagtattttcagcagtgcccaatgtgcaggcagtttgttcaggaatct

SEQ ID NO: 31413 - DNA, 60 bp, Homo sapiens
gcagtcaaaaagagcaagataaagacaaaccgaagactctttgaagacatcgtaacactg

SEQ ID NO: 31414 - DNA, 60 bp, Homo sapiens
aatctgccacagagcagtcaggaactggtatccgatcagagagtgagacagagtccgagg

SEQ ID NO: 31415 - DNA, 60 bp, Homo sapiens
tcagaaattactattcctcccagcaccccggcagttccacaggctcccgtccagggggag

SEQ ID NO: 31416 - DNA, 60 bp, Homo sapiens
gactacggcaaaggtgtcatcttctacctcagggacaaagtggtcgtggggattgtgcta

SEQ ID NO: 31417 - DNA, 60 bp, Homo sapiens
cttttgggaccaaataatagcttagtagcgaaggagacacatccagacagtctgagggca

SEQ ID NO: 31418 - DNA, 60 bp, Homo sapiens
gcacagatgacctaaggaatgcacttcatgggagtaatgactttgctgctgcggaaagag

SEQ ID NO: 31419 - DNA, 60 bp, Homo sapiens
cgttttatgtttcctgaagtgattgttgagcccattccaattggacaagctgctaaggac

SEQ ID NO: 31420 - DNA, 60 bp, Homo sapiens
gagcagaggcttaaggtcttcagcggggcgctccaggaggcactcacagagcactacaaa

SEQ ID NO: 31421 - DNA, 60 bp, Homo sapiens
aggtgcctttggagagaactgttgcgtgcttgagtctgtgagccagtgtctgcctatagg

SEQ ID NO: 31422 - DNA, 60 bp, Homo sapiens
agatgtgagagggagcaagcaaggttagcaactgtgaacagagaggtcgggatttgccct

SEQ ID NO: 31423 - DNA, 60 bp, Homo sapiens
aagaaagaagctcacagaacctctacttctgccttgtctccaggatccaagcccagcact

SEQ ID NO: 31424 - DNA, 60 bp, Homo sapiens
gaggataaaagaacagaaagaagtaaaggagccaggaagacctccgtgtccccccgatct

SEQ ID NO: 31425 - DNA, 60 bp, Homo sapiens
tgatgaagaggagggtgaggtcaaggctttgggggcagctgagaaggatggagaagctga

SEQ ID NO: 31426 - DNA, 60 bp, Homo sapiens
gctgtaagagaagctgctgctgaatctgacagggaattgaacgaagatgacagtacagat

SEQ ID NO: 31427 - DNA, 60 bp, Homo sapiens
cagcacacaggcgcagcagctgaagaatttaatgatgatactgactgatgaaaatagcat

SEQ ID NO: 31428 - DNA, 60 bp, Homo sapiens
ccttcaccttcagtgtgtaaccaagcacaaaaacagtatcaatgttgaatctgtgaatgg

SEQ ID NO: 31429 - DNA, 60 bp, Homo sapiens
cgcctgcatttaccagccccagcaacacaaagaatttttaatcacacggatctcaaattc

SEQ ID NO: 31430 - DNA, 60 bp, Homo sapiens
tgagttttccttttggtgcatggaactgtggttgccaaggtatttaaaagggctttcctg

SEQ ID NO: 31431 - DNA, 60 bp, Homo sapiens
agcaggtgtagttaaacgacctccactgaactgggtttgacctctgttgtactgatgtgt

SEQ ID NO: 31432 - DNA, 60 bp, Homo sapiens
gttaaaagtgcaattcaggaagtactgggattctgtgtagagccgaggaaaccatttccc

SEQ ID NO: 31433 - DNA, 60 bp, Homo sapiens
aacgaagggagaagctttgttttgcctgcagaagcagccctgtgctcggctgagggttct

SEQ ID NO: 31434 - DNA, 60 bp, Homo sapiens
ccagcctagagcacaacagggcattgggtacttgcatcttaggtatttcttcccagtcac

SEQ ID NO: 31435 - DNA, 60 bp, Homo sapiens
tgcctggctgacttacagcagtcagactctgacaggatcatggctatgatggaggtccag

SEQ ID NO: 31436 - DNA, 60 bp, Homo sapiens
cacagtgctcctgcagtctctctgtgtggctgtaacttacgtgtactttaccaacgagct

SEQ ID NO: 31437 - DNA, 60 bp, Homo sapiens
agagagtatgaacagcccctgctggcaagtcaagtggcaactccgtcagctcgttagaaa

SEQ ID NO: 31438 - DNA, 60 bp, Homo sapiens
tttccaggaggaactagaggttgcacgattaagggaagaagtagtgaccaagatcagggc

SEQ ID NO: 31439 - DNA, 60 bp, Homo sapiens
gcttcttcgctttcaagccacaagctcaggacccatccttagggaagagtttgaagctag

SEQ ID NO: 31440 - DNA, 60 bp, Homo sapiens
ctgattctgttgtgaagattcagtcctggttccgaatggcaactgcaagaaagagctatc

SEQ ID NO: 31441 - DNA, 60 bp, Homo sapiens
ggatagcagagtctgaaaataccttggtctcccccattatgtgagcccttatttgagagc

SEQ ID NO: 31442 - DNA, 60 bp, Homo sapiens
cacagaaaggaggcagcacacagagaaagatgcacagatcaacccacatctgcatgggtt

SEQ ID NO: 31443 - DNA, 60 bp, Homo sapiens
gtgagagcagtggtggagcaatagaagattgctgtgacaccaggctgcttactgtctttc

SEQ ID NO: 31444 - DNA, 60 bp, Homo sapiens
gtaatttcagtttgcctctactggagaatctcagcaggggtttcagcctgactgtctccc

SEQ ID NO: 31445 - DNA, 60 bp, Homo sapiens
accagactctacctctgaatgtgctgggaacctcttggagcctgtcaggaactcctcact

SEQ ID NO: 31446 - DNA, 60 bp, Homo sapiens
tggagctggtttcctagatatgaatgatgtttgcaatccccattttcctgtttcagcatg

SEQ ID NO: 31447 - DNA, 60 bp, Homo sapiens
tctgattggtcccatgcaggagactgcctccagtcacgagcagcctgcctctggactgat

SEQ ID NO: 31448 - DNA, 60 bp, Homo sapiens
caacagaagctctatcaagtgccaaacccacaggctgctccccgagacaccatctaccaa

SEQ ID NO: 31449 - DNA, 60 bp, Homo sapiens
agggaatttaccaagtccccactggccacggcacccaagaacaagaggtatatcaggtgc

SEQ ID NO: 31450 - DNA, 60 bp, Homo sapiens
gtgcttagtgagcaatagtgattgagctcatgttccctgcaagtgccatttcctctccag

SEQ ID NO: 31451 - DNA, 60 bp, Homo sapiens
gatgggcctctaaagctgaggcctggctcagagcctgtttgccctctgtcttaaacaatt

SEQ ID NO: 31452 - DNA, 60 bp, Homo sapiens
ccaaagttccctgtctcctttattttagggtcctctaggcccttttcattttatgtcccc

SEQ ID NO: 31453 - DNA, 60 bp, Homo sapiens
tggcctgctaaggctcctccttgcccagactacagggcttaggacttggtttgttatttc

SEQ ID NO: 31454 - DNA, 60 bp, Homo sapiens
ttcatctggagggttctaagtgggagaaggactatcaacaccactaggaatcccagaggt

SEQ ID NO: 31455 - DNA, 60 bp, Homo sapiens
tggcacagtgtaatccaggggtgtagatgggggaactgtgaatacttgaactctgttccc

SEQ ID NO: 31456 - DNA, 60 bp, Homo sapiens
gtttctgtgtctgcagtgactctgggcctgggcctcatcatcttctctcttggtgtgatc

SEQ ID NO: 31457 - DNA, 60 bp, Homo sapiens
agctggcggagagctggccactctagttacactcctcttcctgggtccaattattcagaa

SEQ ID NO: 31458 - DNA, 60 bp, Homo sapiens
ggatggcacatttcctagaggcagaatcctacaacttccactccaagtgagaaggagatt

SEQ ID NO: 31459 - DNA, 60 bp, Homo sapiens
ctatgacccagctaactctctccatcttcatacttttgatgtgaccttcattcttccagt

SEQ ID NO: 31460 - DNA, 60 bp, Homo sapiens
gtccaacatttacaatctggaacaaatccctaatgatcctgtctggcttgcctgccccag

SEQ ID NO: 31461 - DNA, 60 bp, Homo sapiens
agcggcaggaatgcaactgcaggcctcaagaatccccttatgtttctgggatgaaaacct

SEQ ID NO: 31462 - DNA, 60 bp, Homo sapiens
cacgagacgggaacattattcatggaaggacgggccatcttgtcacttgttttcactgtg

SEQ ID NO: 31463 - DNA, 60 bp, Homo sapiens
ccagaagactaaagaaggctggggcttcatgccctatttgcaagaaagagattcagctgg

SEQ ID NO: 31464 - DNA, 60 bp, Homo sapiens
ccatggattactttatgcagcagtcaggtacatagttaggtgaacccaaaagaaaaactc

SEQ ID NO: 31465 - DNA, 60 bp, Homo sapiens
caatattaacacgctgcctggtctgtctggatcccgaggtatggcagaggtgcaagacct

SEQ ID NO: 31466 - DNA, 60 bp, Homo sapiens
tacacacacagcctatatcaaacatgcacacgggcgagctttctctccgacttcccctgg

SEQ ID NO: 31467 - DNA, 60 bp, Homo sapiens
taatattgaggctgcagcaggtgctgggctggactggccatttttctgggggtaggatga

SEQ ID NO: 31468 - DNA, 60 bp, Homo sapiens
tctgctgggtctccctttccatggcaaatgggcagctccatcctcttgatcttctaaatg

SEQ ID NO: 31469 - DNA, 60 bp, Homo sapiens
tggcaagaaataggaaaccccccaatgtctgttgaacagctatcacgttgaaccacgtga

SEQ ID NO: 31470 - DNA, 60 bp, Homo sapiens
tcaggcttttatgaggaaagcgtttctgtgtagaaactggaagctgttcagggcatcggc

SEQ ID NO: 31471 - DNA, 60 bp, Homo sapiens
aggttcctgtcccaggatgaccttgtgcagtccattggtgtgagtgcagcactaggggca

SEQ ID NO: 31472 - DNA, 60 bp, Homo sapiens; identical to SEQ ID NO: 5296

SEQ ID NO: 31473 - DNA, 60 bp, Homo sapiens
gagatccaggacagatggaagcctttctacacctgtggccagacggcagccttggagatt

SEQ ID NO: 31474 - DNA, 60 bp, Homo sapiens
agaagttctgcctctgcctggggtcttggccacattggagaaaaacaggctcaaagtggg

SEQ ID NO: 31475 - DNA, 60 bp, Homo sapiens
aacctgagctctcccaggagacaacttagctgccagtcaccacctatgaggctcttctac

SEQ ID NO: 31476 - DNA, 60 bp, Homo sapiens
ggtcccccagacctctctgtgttgtgtgcgtggcagcctccaggaataaacattcttgtt

SEQ ID NO: 31477 - DNA, 60 bp, Homo sapiens
tatgcatccctcagcttccagatggtgaagccttgggactcgcggggacaggaggccact

SEQ ID NO: 31478 - DNA, 60 bp, Homo sapiens
cagaggctgattcttgtagaattaacagccctcaacgtgatgagctatgataacactatg

SEQ ID NO: 31479 - DNA, 60 bp, Homo sapiens; identical to SEQ ID NO: 14303

SEQ ID NO: 31480 - DNA, 60 bp, Homo sapiens
ctattcagaggctcaacccatgcctgatggagctgtgccaattcttccagcaatgcctct

SEQ ID NO: 31481 - DNA, 60 bp, Homo sapiens
cccactcgcacaccttaaagcaaaagtgccttgagaatatctgcaagtctgtgtgaggcc

SEQ ID NO: 31482 - DNA, 60 bp, Homo sapiens
aattacttcaggggatacgccatccaccctggctcttgtcccaagtgggctacatttgaa

SEQ ID NO: 31483 - DNA, 60 bp, Homo sapiens
gccactgatattcagaattatgatggaagacaggaaagtttagagttttctgggcaggac

SEQ ID NO: 31484 - DNA, 60 bp, Homo sapiens
actacaggtagttaagggccacctacaatacatctgaggtcctgtgatcttatttttcta

SEQ ID NO: 31485 - DNA, 60 bp, Homo sapiens
aacgtaagcactgtttttccatagttttgatgactggcattttatagacaccctggcagc

SEQ ID NO: 31486 - DNA, 60 bp, Homo sapiens
tttgggatggttgattaggacttgttgctgtggcggtagctcaccaatccaatgcgtgca

SEQ ID NO: 31487 - DNA, 60 bp, Homo sapiens
ctttattaggctatagggcccagtggctgcgacagggacctgatacaacagtgcgttaaa

SEQ ID NO: 31488 - DNA, 60 bp, Homo sapiens
taaggagcttattgagctatcatgtcgtaagccggtggagaagtccagggctagtgtggg

SEQ ID NO: 31489 - DNA, 60 bp, Homo sapiens
gggccttgctacctcaagggggactgtctttcagatacatggttgtgacctgaggattta

SEQ ID NO: 31490 - DNA, 60 bp, Homo sapiens
gcttgcataataagctaaagaggctgaaagaggccaatgccccactggcagcatcttcac

SEQ ID NO: 31491 - DNA, 60 bp, Homo sapiens
tgcatatcctgagccatcggtgaaactaacagataagcaagagagatgttttggggactc

SEQ ID NO: 31492 - DNA, 60 bp, Homo sapiens
cgaccagactgaggacatcagggatgttcttagaagtttcatggacggtttcaccacact

SEQ ID NO: 31493 - DNA, 60 bp, Homo sapiens
cactgccctggaggtggcggcctgctgctgttatctttttaactgttttctcatgatgcc

SEQ ID NO: 31494 - DNA, 60 bp, Homo sapiens
gatgaattcctatggctctgcaattgtcaccggttaactgtggcctgtgcccaggaagag

SEQ ID NO: 31495 - DNA, 60 bp, Homo sapiens
aaagaagcaggtaattcacccccctccagatcagttcctttatcctcattcacacccttc

SEQ ID NO: 31496 - DNA, 60 bp, Homo sapiens
ccagggtaattaaaatgcttaggaggggtaaagggagtggatggagctgaaagataagcc

SEQ ID NO: 31497 - DNA, 60 bp, Homo sapiens
cccggaggccaattgaattaatgccaatgagtggtggagaaggaggtccatccaacctct

SEQ ID NO: 31498 - DNA, 60 bp, Homo sapiens
attaagacaagaaacacaggaagcccctggtcccagagaagaagcaaagggccaggtaga

SEQ ID NO: 31499 - DNA, 60 bp, Homo sapiens
gagaggaggccaaggaacttccaggggaaacactggagtctaagaacacccaaaatgact

SEQ ID NO: 31500 - DNA, 60 bp, Homo sapiens
ttaagatacaggtacccacagaagtctcagtgccagaacataagccctgaagtgggcagg

SEQ ID NO: 31501 - DNA, 60 bp, Homo sapiens
tcttgggcaagttccgggcggaagaggtggccatcaagaaagtgagagaacagaatgaga

SEQ ID NO: 31502 - DNA, 60 bp, Homo sapiens
atggaatactgtgcccatggacaactctacgaggtcttacgagctggcaggaagatcaca

SEQ ID NO: 31503 - DNA, 60 bp, Homo sapiens
ctcgattgctagtagactggtccacaggaattgcaagtggaatgaattatttgcacctcc

SEQ ID NO: 31504 - DNA, 60 bp, Homo sapiens
agcaagtgaagaccatgaagacagccttgcaacagctggagaggattgacaagcccaagg

SEQ ID NO: 31505 - DNA, 60 bp, Homo sapiens
cacagtctcagatagggttcatcgacttcattgtggagcccacattctctgtgctgactg

SEQ ID NO: 31506 - DNA, 60 bp, Homo sapiens
ctccaagtctaaaaaccagcccagctttcagtggcgccagccctctctggatgtggaagt

SEQ ID NO: 31507 - DNA, 60 bp, Homo sapiens
ccactattgctggagtcatgacactaagtcaagttaaaggctttgttcgaaagaatggtg

SEQ ID NO: 31508 - DNA, 60 bp, Homo sapiens; identical to SEQ ID NO: 13173

SEQ ID NO: 31509 - DNA, 60 bp, Homo sapiens
gaagaagctatgaccttttgctgaaatatcagttactgaacaggcaggccactttgcctc

SEQ ID NO: 31510 - DNA, 60 bp, Homo sapiens
aagcaggacttccgggaggaccaggatgctgccttcttcaaggcctgggcaatatttaag

SEQ ID NO: 31511 - DNA, 60 bp, Homo sapiens
cacaggaggtccagctgtctggaagactcgcctgcgctgtgcactcaacaagagttctga

SEQ ID NO: 31512 - DNA, 60 bp, Homo sapiens
atttaaggaggttcctgagaggggccgcatggatgttgctgagccctacaaggtgtatca

SEQ ID NO: 31513 - DNA, 60 bp, Homo sapiens
catcaagatgtacgtggtggccatcatcacgggccaagtgaggctgcggaagaaggcctt

SEQ ID NO: 31514 - DNA, 60 bp, Homo sapiens
tccttggccaccagaccatgggccaagagccgccgtggctatacctggggacttgatgtt

SEQ ID NO: 31515 - DNA, 60 bp, Homo sapiens
atgttccttccagattgtggtgggccctgagtcctggtttcctggcagcctgctgcgcgt

SEQ ID NO: 31516 - DNA, 60 bp, Homo sapiens; identical to SEQ ID NO: 4855

SEQ ID NO: 31517 - DNA, 60 bp, Homo sapiens
agtgggtggaggcagccagggcttacctgtacactgacttgagaccagttgaataaaagt

SEQ ID NO: 31518 - DNA, 60 bp, Homo sapiens
tcaacggaattcatcctctatgaaccttaagtgcctcgtatacatgagtgttgagtctat

SEQ ID NO: 31519 - DNA, 60 bp, Homo sapiens
ccgaactggtgcaattaaccggaaccggattcaggagactcctccgcgattcccatcaga

SEQ ID NO: 31520 - DNA, 60 bp, Homo sapiens; identical to SEQ ID NO: 31240

SEQ ID NO: 31521 - DNA, 60 bp, Homo sapiens
actgctggaggcaggcacatcgggcacctggggcagtgctacagtattcatgccacatgt

SEQ ID NO: 31522 - DNA, 60 bp, Homo sapiens
tcacaactggcccatgtgatggatcgtctgtttccctgtgcgggccccatagccccattt

SEQ ID NO: 31523 - DNA, 60 bp, Homo sapiens
atccacaaatggacagtgacccccactccatgcacccatgcctctgttcctgctcttggt

SEQ ID NO: 31524 - DNA, 60 bp, Homo sapiens
atggcccccatctttgctagtaatctagagctggcttcggcttctgctgagtttggccct

SEQ ID NO: 31525 - DNA, 60 bp, Homo sapiens
tgcaccagcctggcttgtagtgctgagggcctggggaatggggatgctagggaggaaaat

SEQ ID NO: 31526 - DNA, 60 bp, Homo sapiens; identical to SEQ ID NO: 21132

SEQ ID NO: 31527 - DNA, 60 bp, Homo sapiens; identical to SEQ ID NO: 31250

SEQ ID NO: 31528 - DNA, 60 bp, Homo sapiens; identical to SEQ ID NO: 31254

SEQ ID NO: 31529 - DNA, 60 bp, Homo sapiens; identical to SEQ ID NO: 31257

SEQ ID NO: 31530 - DNA, 60 bp, Homo sapiens; identical to SEQ ID NO: 31260

SEQ ID NO: 31531 - DNA, 60 bp, Homo sapiens
tgagtgggcagaagagtggaagcacctcaacaacctcctgaactgcatcatggacatggt

SEQ ID NO: 31532 - DNA, 60 bp, Homo sapiens; identical to SEQ ID NO: 31266

SEQ ID NO: 31533 - DNA, 60 bp, Homo sapiens
tggccaaaaggtgttggcattcactgctcagtgttccaaagattctccgcatctcctctg

SEQ ID NO: 31534 - DNA, 60 bp, Homo sapiens; identical to SEQ ID NO: 31272

SEQ ID NO: 31535 - DNA, 60 bp, Homo sapiens; identical to SEQ ID NO: 31273

SEQ ID NO: 31536 - DNA, 60 bp, Homo sapiens
aatataaaggacatcctcatcatcacggggtgaaggtcagactaaggcagccttcttcac

SEQ ID NO: 31537 - DNA, 60 bp, Homo sapiens
agaaggtatctggcaccagcttgtcttaggccagtatagcttaggacagggatcgacaga

SEQ ID NO: 31538 - DNA, 60 bp, Homo sapiens
ccatgagccttgaactctgttctttgcatttcaatttcaccgtcaagcctttcaccttcc

SEQ ID NO: 31539 - DNA, 60 bp, Homo sapiens
ctgacctcagagtcctttttggcatctaacctcctgtggataagggctcagaatagcacc

SEQ ID NO: 31540 - DNA, 60 bp, Homo sapiens
gcttatgcctcagaactccgggtttgcatcgactttacaagagacattcgggaagccctt

SEQ ID NO: 31541 - DNA, 60 bp, Homo sapiens; identical to SEQ ID NO: 31279

SEQ ID NO: 31542 - DNA, 60 bp, Homo sapiens; identical to SEQ ID NO: 31284

SEQ ID NO: 31543 - DNA, 60 bp, Homo sapiens
ggcggatccaagcaaatggccaatgagatcattgtgaaggcaggggaatgtatgtgcaca

SEQ ID NO: 31544 - DNA, 60 bp, Homo sapiens; identical to SEQ ID NO: 31286

SEQ ID NO: 31545 - DNA, 60 bp, Homo sapiens
aaatactggcgtctgccccctaaaaagtaaatcaggaaaacccagggttagctgcaggac

SEQ ID NO: 31546 - DNA, 60 bp, Homo sapiens
ctggacagcttacctagtcttgtagcattcggccttggtgaacacacacgctccctggaa

SEQ ID NO: 31547 - DNA, 60 bp, Homo sapiens
ttctgcgttgggttttcccttgccttatgggctgaagtgttctctagaatccagcaggtc

SEQ ID NO: 31548 - DNA, 60 bp, Homo sapiens
gggggcagggcagcacagggaatatttttgtaactaactaactgctgtggttggagcgaa

SEQ ID NO: 31549 - DNA, 60 bp, Homo sapiens
ttaattacagggctcgtccaactggtccctcagtcacacatgccagagattgctcaggaa

SEQ ID NO: 31550 - DNA, 60 bp, Homo sapiens
gctttgaagtggatcctaccaggttagaaccatcagagagccttgaggaaaaccagcgga

SEQ ID NO: 31551 - DNA, 60 bp, Homo sapiens
gcagaggccagtgttgtgtttcccaaagtctttcctgttgtgcataatttgttggactct

SEQ ID NO: 31552 - DNA, 60 bp, Homo sapiens
gtaaacctcaagtttgccattatcttataagaatgggtgtgctaagttacttggcagctg

SEQ ID NO: 31553 - DNA, 60 bp, Homo sapiens
ggctcctctgtatttagcactcacatcagtgcccactgtcaaatagggaggctcatcaag

SEQ ID NO: 31554 - DNA, 60 bp, Homo sapiens
tgttaaatccaatccatggaattgtgcagagtgtggtgtaccatgaagaatccccaccac

SEQ ID NO: 31555 - DNA, 60 bp, Homo sapiens; identical to SEQ ID NO: 31299

SEQ ID NO: 31556 - DNA, 60 bp, Homo sapiens
ggtgcaaagtgaaagtaactgttaaggagcttcagggaaaagggtccagggttcccagta

SEQ ID NO: 31557 - DNA, 60 bp, Homo sapiens
cacagtctcagttctcttgctttcacattgtacttaaacctcctgctgtgcctcgcatcc

SEQ ID NO: 31558 - DNA, 60 bp, Homo sapiens
atgtttgctgctgcagagaacaaggtcgctgtcaagggctgactcctccctgttgacgaa

SEQ ID NO: 31559 - DNA, 60 bp, Homo sapiens; identical to SEQ ID NO: 31302

SEQ ID NO: 31560 - DNA, 60 bp, Homo sapiens; identical to SEQ ID NO: 31303

SEQ ID NO: 31561 - DNA, 60 bp, Homo sapiens
agtggaagcagagttttggcgggcgagcagcgccttgcaggaaactgactcatcactact

SEQ ID NO: 31562 - DNA, 60 bp, Homo sapiens
caatggatcctgcctgggaggaggacttgaggttgccatttcatgccaatacagaatagc

SEQ ID NO: 31563 - DNA, 60 bp, Homo sapiens
agactatacttaaagatgccaccctcactgcgctagaccgaggacagcaacaagtgttca

SEQ ID NO: 31564 - DNA, 60 bp, Homo sapiens
aggtgattggcatgcactacttctctcccgtggacaagatgcagctgctggagattatca

SEQ ID NO: 31565 - DNA, 60 bp, Homo sapiens; identical to SEQ ID NO: 31308

SEQ ID NO: 31566 - DNA, 60 bp, Homo sapiens
gcatctttgcccttctggtttaaacgcctccttcaaaaagcaatctggaagaaagccctg

SEQ ID NO: 31567 - DNA, 60 bp, Homo sapiens
cgtatcagggcctgcgggattttgatatagtttgcagggtaattgctctattgttaaggg

SEQ ID NO: 31568 - DNA, 60 bp, Homo sapiens
cagcccgaattatcggtgacccatcactacatggagatgtttggtcgtggctggaattct

SEQ ID NO: 31569 - DNA, 60 bp, Homo sapiens
ggcatttgaggtatcagggaggaagcctcacccattccctagtgtcagcaaaataattgc

SEQ ID NO: 31570 - DNA, 60 bp, Homo sapiens; identical to SEQ ID NO: 31309

SEQ ID NO: 31571 - DNA, 60 bp, Homo sapiens
tccaactcagagggagtgtgatttgcctgatcctcttcggcgttgtcctgctctgccgca

SEQ ID NO: 31572 - DNA, 60 bp, Homo sapiens; identical to SEQ ID NO: 31314

SEQ ID NO: 31573 - DNA, 60 bp, Homo sapiens
acaagcaaatgctggtgaatgctttcacggagcaaattctgcctcacttctccacggagg

SEQ ID NO: 31574 - DNA, 60 bp, Homo sapiens
agactactcccttgggtttactctggctcatccaagtcatacccagcaaactcctcccat

SEQ ID NO: 31575 - DNA, 60 bp, Homo sapiens; identical to SEQ ID NO: 31317

SEQ ID NO: 31576 - DNA, 60 bp, Homo sapiens; identical to SEQ ID NO: 31320

SEQ ID NO: 31577 - DNA, 60 bp, Homo sapiens
gtgcgcttctacacagagaagaatggacagctcatctacacgccattcactgaggacaca

SEQ ID NO: 31578 - DNA, 60 bp, Homo sapiens
ggaggcagaaccagctctttggtgccagctgtttcatcaccagactttggctcccgcttt

SEQ ID NO: 31579 - DNA, 60 bp, Homo sapiens
tgctgcactcggtgtcgtccagcctgtcgagcagcgagctgaccgagctcaagttcctat

SEQ ID NO: 31580 - DNA, 60 bp, Homo sapiens; identical to SEQ ID NO: 31323

SEQ ID NO: 31581 - DNA, 60 bp, Homo sapiens
acccgaaggatgactttgtcagagctgtggaggtgacacaggaccataagccagaacttc

SEQ ID NO: 31582 - DNA, 60 bp, Homo sapiens
caacaacaaatagtcactcaactcctgctctttggcaggtacgtcaccaagcactgagga

SEQ ID NO: 31583 - DNA, 60 bp, Homo sapiens; identical to SEQ ID NO: 31327

SEQ ID NO: 31584 - DNA, 60 bp, Homo sapiens; identical to SEQ ID NO: 31332

SEQ ID NO: 31585 - DNA, 60 bp, Homo sapiens
ttcactctggagctggaaagggcacgggaactggagttggctgtgttctggcgggaccag

SEQ ID NO: 31586 - DNA, 60 bp, Homo sapiens
gatgtgccaagcacagctctcagtactaactcctttaatcttcatatcaaccctaggagg

SEQ ID NO: 31587 - DNA, 60 bp, Homo sapiens
caaaatcctggagccagaagaaaggacagcagcattgatcaatcttacagctaacatgtt

SEQ ID NO: 31588 - DNA, 60 bp, Homo sapiens
ggactatttcacgacccaggggctgaccaccatctatcagattgagcattactccatgga

SEQ ID NO: 31589 - DNA, 60 bp, Homo sapiens
cgagatgagtggaatgacttcaactttgacatggatgctcgccgcaataagcaacagcgc

SEQ ID NO: 31590 - DNA, 60 bp, Homo sapiens
tttttaagcttcagttgcttgtcttctggtactttctgttatgggcttttggggagccag

SEQ ID NO: 31591 - DNA, 60 bp, Homo sapiens
cttacgttttgagtaagtgagatccaagcagacgtgttaaaatcagcactcctggactgg

SEQ ID NO: 31592 - DNA, 60 bp, Homo sapiens
ggggaaatatctgggtgcagaaggataaggtagcatcatgttgccgtattttagcatctc

SEQ ID NO: 31593 - DNA, 60 bp, Homo sapiens
ggaacgagttcaagaacatcttcggcaccccggagtttgtggccccagagattgtgaact

SEQ ID NO: 31594 - DNA, 60 bp, Homo sapiens
tcacgaggcgttgactctgctgccggatgagcccctgaacctcagttcacactggcaggt

SEQ ID NO: 31595 - DNA, 60 bp, Homo sapiens; identical to SEQ ID NO: 31338

SEQ ID NO: 31596 - DNA, 60 bp, Homo sapiens
gcattgtgttcactgtactctgtgggcaaggatgggtccagaagaccccacttcaggcac

SEQ ID NO: 31597 - DNA, 60 bp, Homo sapiens; identical to SEQ ID NO: 13797

SEQ ID NO: 31598 - DNA, 60 bp, Homo sapiens
gcaatgacatgactccagagcaaatggctacaaatgtgaactgttccagccctgagcgac

SEQ ID NO: 31599 - DNA, 60 bp, Homo sapiens
ttaagcaggctcctcggaagtccccctccgacactgagggtcttgtaaagagtctgcctt

SEQ ID NO: 31600 - DNA, 60 bp, Homo sapiens
ccggcggacatcacagtgacaagattaacaagtcagagtctgtggtgtatgcggatatcc

SEQ ID NO: 31601 - DNA, 60 bp, Homo sapiens
aatggtatcattatgttgccgctctccaatctcccagagctcgctctctagaggaatcac

SEQ ID NO: 31602 - DNA, 60 bp, Homo sapiens
gagctgctcagcagtctgtgctctgtgtttcaataccatccactatgcaattagtattct

SEQ ID NO: 31603 - DNA, 60 bp, Homo sapiens; identical to SEQ ID NO: 31349

SEQ ID NO: 31604 - DNA, 60 bp, Homo sapiens
tggcattttgtgacccttccctgttgctgtccctgcatctcgtctgtgtgcccagggtgt

SEQ ID NO: 31605 - DNA, 60 bp, Homo sapiens; identical to SEQ ID NO: 31353

SEQ ID NO: 31606 - DNA, 60 bp, Homo sapiens
agggaatctgaacacgacctcctggtccacaaggctgtggccaaatggacggcggaagaa

SEQ ID NO: 31607 - DNA, 60 bp, Homo sapiens
ctgattgctgagtttgcttgggactggttggaggtccattactggacatcacggtttctc

SEQ ID NO: 31608 - DNA, 60 bp, Homo sapiens
ggtgaggcagggagcggacttcctattttctaccctcagtaaaacaaggtgctgctttgt

SEQ ID NO: 31609 - DNA, 60 bp, Homo sapiens
ccctttctctgaatggagagattgagagggatgtcgggcagttcccattagatttagtgg

SEQ ID NO: 31610 - DNA, 60 bp, Homo sapiens
tgtgaacacagcaggtgtgagatgtcatcttggaagacaggccttgcagaaataggccta

SEQ ID NO: 31611 - DNA, 60 bp, Homo sapiens
acagcagtgaccaccacctcagcggctgtagtgtcccagagtcctcagctgtataatcaa

SEQ ID NO: 31612 - DNA, 60 bp, Homo sapiens
cccatcagggacatttaacacgaaaccacaataaggcatcatttatacccactaagatgg

SEQ ID NO: 31613 - DNA, 60 bp, Homo sapiens
gtaagactggattcagctgtttgcaatatgcattaaaacctactaactggggcagggagc

SEQ ID NO: 31614 - DNA, 60 bp, Homo sapiens
caggctagcactcaaggacctgactgctccacgcagttgacaaaatgtgattcattacta

SEQ ID NO: 31615 - DNA, 60 bp, Homo sapiens
gaaagtgtcaaggcattacggctcccattgaggctcaagttcggctaaagggagctggcc

SEQ ID NO: 31616 - DNA, 60 bp, Homo sapiens
attgaccacagtaacattggcaacaagatgctgcaggccatgggctggcgggaaggctct

SEQ ID NO: 31617 - DNA, 60 bp, Homo sapiens
tgtcaaggcattacggctcccattgaggctcaagttcggctaaagggagctggcctagga

SEQ ID NO: 31618 - DNA, 60 bp, Homo sapiens
aggagcacaagaagtggtccatctcccgaattcgctgttaccgcctgtctctttaagggc

SEQ ID NO: 31619 - DNA, 60 bp, Homo sapiens
ttaaagaagttccccttatgtgggttgcctggtgaatggccttccttcccgccagagggc

SEQ ID NO: 31620 - DNA, 60 bp, Homo sapiens
gttgtggtccatcagcccctcacattcctaggggtttgagatgctgtaggtggtatgtga

SEQ ID NO: 31621 - DNA, 60 bp, Homo sapiens
gttgttcagcttctgaattctcaggactaccctctgttgctcacttcactattgttcagg

SEQ ID NO: 31622 - DNA, 60 bp, Homo sapiens
atcccattcctctctcattcacccttctgggctgactgtattgaacatgcaacattaaac

SEQ ID NO: 31623 - DNA, 60 bp, Homo sapiens
tctgaggaatagtttgtgattccaatgcaggtgtcttcattaccattacctctacactgc

SEQ ID NO: 31624 - DNA, 60 bp, Homo sapiens
gagatagatcagccagtggcccaaagccatttcaagtacagaaattatagagactacagc

SEQ ID NO: 31625 - DNA, 60 bp, Homo sapiens; identical to SEQ ID NO: 31362

SEQ ID NO: 31626 - DNA, 60 bp, Homo sapiens; identical to SEQ ID NO: 31363

SEQ ID NO: 31627 - DNA, 60 bp, Homo sapiens
tacttaggactacattttgctctgtgaactatcccctgcgctttgaacgtgccagcagcc

SEQ ID NO: 31628 - DNA, 60 bp, Homo sapiens
ccgaggacccagtgttcttagctgaacaatgaatgctgaccctaaatgtggacatcatga

SEQ ID NO: 31629 - DNA, 60 bp, Homo sapiens
ctagctgtatgaccttgattgtgtgccttaaccgctctgtgacacagtctacctgtctgc

SEQ ID NO: 31630 - DNA, 60 bp, Homo sapiens
gctaggatcccatggatgggcacatgatccaggagtctgaactcctcccaaagccattac

SEQ ID NO: 31631 - DNA, 60 bp, Homo sapiens
gagtgcccctccctgctcagtatgggcaccagccacagggtctgttctcaaggactgtga

SEQ ID NO: 31632 - DNA, 60 bp, Homo sapiens
atcctggttttagacgaggccacagctgccatcgacctggagactgacaacctcatccag

SEQ ID NO: 31633 - DNA, 60 bp, Homo sapiens
ccctaggaactcagtcctgtactctggggtgctgcctgaatccattaaaaatgggagtac

SEQ ID NO: 31634 - DNA, 60 bp, Homo sapiens; identical to SEQ ID NO: 31375

SEQ ID NO: 31635 - DNA, 60 bp, Homo sapiens
tttcaggatggaaaaggcactagaagaagcaaatgccctccaagaaggtcattctgtgcc

SEQ ID NO: 31636 - DNA, 60 bp, Homo sapiens; identical to SEQ ID NO: 31380

SEQ ID NO: 31637 - DNA, 60 bp, Homo sapiens; identical to SEQ ID NO: 31382

SEQ ID NO: 31638 - DNA, 60 bp, Homo sapiens
gctagaagagtccagaaaggattttctcttagagcctttgaaggaagtatggccctgttc

SEQ ID NO: 31639 - DNA, 60 bp, Homo sapiens
aatatggcagcagcctgttagttgactgtcctgcctcctgtttgccctcttatctgtcct

SEQ ID NO: 31640 - DNA, 60 bp, Homo sapiens
ggttcgatacaagaggctgttttcctagcgtggcttgctgcctttggtaagaacatgtcg

SEQ ID NO: 31641 - DNA, 60 bp, Homo sapiens; identical to SEQ ID NO: 31388

SEQ ID NO: 31642 - DNA, 60 bp, Homo sapiens
tgaagagacaatgaacaccagcccggggactcctgccccagctgctgaagagacaatgaa

SEQ ID NO: 31643 - DNA, 60 bp, Homo sapiens
tgttgatagagtaaaagaataaagacagggaacacaggtgggctggcccgtcttcagaag

SEQ ID NO: 31644 - DNA, 60 bp, Homo sapiens
ggcagctgtcttgtgcattacttgtgtttccagcaccaaagttgtgggacatgttgctgt

SEQ ID NO: 31645 - DNA, 60 bp, Homo sapiens
ccttaggtaaaactcgaaccttaaatttggattgaaatcaggtgctgtcagagtgttgcc

SEQ ID NO: 31646 - DNA, 60 bp, Homo sapiens; identical to SEQ ID NO: 31395

SEQ ID NO: 31647 - DNA, 60 bp, Homo sapiens; identical to SEQ ID NO: 31398

SEQ ID NO: 31648 - DNA, 60 bp, Homo sapiens
gtttgctcttgtcttagatgctcagatggtagtggataggcctgtgacgaaggtgctacc

SEQ ID NO: 31649 - DNA, 60 bp, Homo sapiens
aaaagtgccctccagaggccccccgtattggggacactgacctttaacaacgaatggggg

SEQ ID NO: 31650 - DNA, 60 bp, Homo sapiens
acgtggagttaggcaggttaggggactcggagactgcgatggtgccaggaaagggtggag

SEQ ID NO: 31651 - DNA, 60 bp, Homo sapiens
gaggttgggccttggccgcctgagcccttgagttggtcacttgaaccttgggaatattga

SEQ ID NO: 31652 - DNA, 60 bp, Homo sapiens; identical to SEQ ID NO: 13279

SEQ ID NO: 31653 - DNA, 60 bp, Homo sapiens
cactgtgaataactgtgtttcctaccgaaaccctgcagagggaacctggtacatccagtc

SEQ ID NO: 31654 - DNA, 60 bp, Homo sapiens
gaattcagctaaatgcatagcgcttctgtggaatgtattaggcgatgaaattgctgtggt

SEQ ID NO: 31655 - DNA, 60 bp, Homo sapiens; identical to SEQ ID NO: 31404

SEQ ID NO: 31656 - DNA, 60 bp, Homo sapiens
gtaatggagttagtgtccagtcagctgagctccaccctgatgccagtggtgagtgttcat

SEQ ID NO: 31657 - DNA, 60 bp, Homo sapiens; identical to SEQ ID NO: 31406

SEQ ID NO: 31658 - DNA, 60 bp, Homo sapiens
tacatgtgagcggtaatcgcccctgcagctggttatcctgacattatgcactccgaagca

SEQ ID NO: 31659 - DNA, 60 bp, Homo sapiens
tatggagagaacagttgccactcgactcagagattgagtagacacccaaagaactgcagt

SEQ ID NO: 31660 - DNA, 60 bp, Homo sapiens; identical to SEQ ID NO: 31409

SEQ ID NO: 31661 - DNA, 60 bp, Homo sapiens
ttcagcagtgcccaatgtgcaggcagtttgttcaggaatcttttgcactttgcagtcaaa

SEQ ID NO: 31662 - DNA, 60 bp, Homo sapiens
tccagatgacaagacaaatggctagctctggtgcatcagggggcaaaatcgataattctg

SEQ ID NO: 31663 - DNA, 60 bp, Homo sapiens
ccagggtactgattgtatctgaagatcctgagctgccgtacatgcgacctcctctttcaa

SEQ ID NO: 31664 - DNA, 60 bp, Homo sapiens; identical to SEQ ID NO: 31416

SEQ ID NO: 31665 - DNA, 60 bp, Homo sapiens; identical to SEQ ID NO: 31418

SEQ ID NO: 31666 - DNA, 60 bp, Homo sapiens; identical to SEQ ID NO: 31420

SEQ ID NO: 31667 - DNA, 60 bp, Homo sapiens
aggaaaactggctatcagaacctcctgatgccctggtgggcttagggaaccatctctcct

SEQ ID NO: 31668 - DNA, 60 bp, Homo sapiens; identical to SEQ ID NO: 31423

SEQ ID NO: 31669 - DNA, 60 bp, Homo sapiens
taaggaagatgattcagaagcagccttgggagaagctgagtcagacccacatccctccca

SEQ ID NO: 31670 - DNA, 60 bp, Homo sapiens
agtgggtgcgattctacactaactgtactgggcatgagtgctgtaatttcctcagtagcc

SEQ ID NO: 31671 - DNA, 60 bp, Homo sapiens; identical to SEQ ID NO: 31428

SEQ ID NO: 31672 - DNA, 60 bp, Homo sapiens; identical to SEQ ID NO: 31431

SEQ ID NO: 31673 - DNA, 60 bp, Homo sapiens; identical to SEQ ID NO: 31433

SEQ ID NO: 31674 - DNA, 60 bp, Homo sapiens; identical to SEQ ID NO: 31437

SEQ ID NO: 31675 - DNA, 60 bp, Homo sapiens
gcaacaatccatctctcaagtagtgtatcacagtagtagcctccaggtttccttaaggga

SEQ ID NO: 31676 - DNA, 60 bp, Homo sapiens
ccaaagtaacatatggcaagaactcagaatgagggatgtgcccagattgagagcagccag

SEQ ID NO: 31677 - DNA, 60 bp, Homo sapiens
gtgcactactgcctcatgtaaagactcttgcacgcagagcctttaagtgactaaggaaca

SEQ ID NO: 31678 - DNA, 60 bp, Homo sapiens
gggaaggattattgggtcggggtttgttagggagaggaatacatttcttgctgtactggg

SEQ ID NO: 31679 - DNA, 60 bp, Homo sapiens
ttctggacaacggggagatgagcagccacaggaggctgccagttacatgggcatgtgaat

SEQ ID NO: 31680 - DNA, 60 bp, Homo sapiens
ccacatctgcatgggttgtgagactgagcatagtgagagcagtggtggagcaatagaaga

SEQ ID NO: 31681 - DNA, 60 bp, Homo sapiens; identical to SEQ ID NO: 31446

SEQ ID NO: 31682 - DNA, 60 bp, Homo sapiens
gaagtgcccccaaggagacttgctgagaccttgaacaagtgacacaatgtgagcagaact

SEQ ID NO: 31683 - DNA, 60 bp, Homo sapiens
ggcaagtgtcctatttcttagtgagagcctctaaacaaaccagcttgtgaacctccactg

SEQ ID NO: 31684 - DNA, 60 bp, Homo sapiens
agaagtatctgagacataaactgtacagaaaacttgtccacgtgcttttgtatgcccatg

SEQ ID NO: 31685 - DNA, 60 bp, Homo sapiens
atgtgtatttcttaggagatggctgacttgattgatctacgctaagtggagacatttcac

SEQ ID NO: 31686 - DNA, 60 bp, Homo sapiens
gcaagtactggtcttttgtggaagagggcccatgcagaatctccaccatgtgtagacaac

SEQ ID NO: 31687 - DNA, 60 bp, Homo sapiens
aagacatgggtttcactcgcctcatgcaggccatgtggaaatgtgcacaggaaactgcct

SEQ ID NO: 31688 - DNA, 60 bp, Homo sapiens
tacgctagtgtgagaagcctgcgccccaggaaggatctgtgttagtccctgggatggctc

SEQ ID NO: 31689 - DNA, 60 bp, Homo sapiens
agtgagcaatagtgattgagctcatgttccctgcaagtgccatttcctctccaggatggg

SEQ ID NO: 31690 - DNA, 60 bp, Homo sapiens; identical to SEQ ID NO: 31455

SEQ ID NO: 31691 - DNA, 60 bp, Homo sapiens; identical to SEQ ID NO: 31457

SEQ ID NO: 31692 - DNA, 60 bp, Homo sapiens; identical to SEQ ID NO: 31461

SEQ ID NO: 31693 - DNA, 60 bp, Homo sapiens; identical to SEQ ID NO: 31463

SEQ ID NO: 31694 - DNA, 60 bp, Homo sapiens; identical to SEQ ID NO: 31466

SEQ ID NO: 31695 - DNA, 60 bp, Homo sapiens; identical to SEQ ID NO: 31469

SEQ ID NO: 31696 - DNA, 60 bp, Homo sapiens; identical to SEQ ID NO: 31473

SEQ ID NO: 31697 - DNA, 60 bp, Homo sapiens; identical to SEQ ID NO: 31475

SEQ ID NO: 31698 - DNA, 60 bp, Homo sapiens; identical to SEQ ID NO: 14303

SEQ ID NO: 31699 - DNA, 60 bp, Homo sapiens; identical to SEQ ID NO: 31482

SEQ ID NO: 31700 - DNA, 60 bp, Homo sapiens; identical to SEQ ID NO: 31485

SEQ ID NO: 31701 - DNA, 60 bp, Homo sapiens; identical to SEQ ID NO: 19372

SEQ ID NO: 31702 - DNA, 60 bp, Homo sapiens
ccaatgccccactggcagcatcttcacttctaaatgcatatcctgagccatcggtgaaac

SEQ ID NO: 31703 - DNA, 60 bp, Homo sapiens; identical to SEQ ID NO: 31494

SEQ ID NO: 31704 - DNA, 60 bp, Homo sapiens; identical to SEQ ID NO: 31497

SEQ ID NO: 31705 - DNA, 60 bp, Homo sapiens; identical to SEQ ID NO: 31500

SEQ ID NO: 31706 - DNA, 60 bp, Homo sapiens
ggcaggaagatcacacctcgattgctagtagactggtccacaggaattgcaagtggaatg

SEQ ID NO: 31707 - DNA, 60 bp, Homo sapiens
cccaccccctagaaatgagctgcaataacaggaacatgagacttcgcaaatctctggaaa

SEQ ID NO: 31708 - DNA, 60 bp, Homo sapiens
acccactggggtgcactttaatgttccggcagcaagactggggaacttcaggctcccagt

SEQ ID NO: 31709 - DNA, 60 bp, Homo sapiens
catgcatttgtacagtgggccctgttcatgcgaaatccacatccatggtctcctagacct

SEQ ID NO: 31710 - DNA, 60 bp, Homo sapiens
gtgaaaggaaagctagggactgcacagtcaatggggatgaaccagactgcgtgccctgcc

SEQ ID NO: 31711 - DNA, 60 bp, Homo sapiens; identical to SEQ ID NO: 13173

SEQ ID NO: 31712 - DNA, 60 bp, Homo sapiens
tcaacaagagttctgaatttaaggaggttcctgagaggggccgcatggatgttgctgagc

SEQ ID NO: 31713 - DNA, 60 bp, Homo sapiens
ttacagacacaactgaggccccctttcaaggggatcagaggtccctggagtttctgcttc

SEQ ID NO: 31714 - DNA, 60 bp, Homo sapiens
atgggccaagagccgccgtggctatacctggggacttgatgttccttccagattgtggtg

SEQ ID NO: 31715 - DNA, 60 bp, Homo sapiens
cttggattcctgcacgaagtggctgatgggaaccatttcaagacagattgtgaagattga

SEQ ID NO: 31716 - DNA, 60 bp, Homo sapiens
tctctgtggaagcaaggctggggtcttgggttcctgtatggtggaagctgggtgagccaa

SEQ ID NO: 31717 - DNA, 60 bp, Homo sapiens; identical to SEQ ID NO: 4855

SEQ ID NO: 31718 - DNA, 60 bp, Homo sapiens; identical to SEQ ID NO: 31517

SEQ ID NO: 31719 - DNA, 60 bp, Homo sapiens; identical to SEQ ID NO: 31518

SEQ ID NO: 31720 - DNA, 60 bp, Homo sapiens; identical to SEQ ID NO: 31519

SEQ ID NO: 31721 - DNA, 60 bp, Homo sapiens
aacaagcagggcgagctggagaattacgtgtccgacggctacaagaccgcactgacagag

SEQ ID NO: 31722 - DNA, 60 bp, Homo sapiens
ggggaaagcagactgaccctctttttaaaagtttaccccctcttcaactgaaccctaaag

SEQ ID NO: 31723 - DNA, 60 bp, Homo sapiens
cacctttgccagcgttacctgacaacagtgctggggttgtgctgaaagaccttttaaagc

SEQ ID NO: 31724 - DNA, 60 bp, Homo sapiens
gacccggtatatgaactcacctccaggccagtacttcagccccctcgactgtatgataaa

SEQ ID NO: 31725 - DNA, 60 bp, Homo sapiens
agcagctgtggccaagactgtgaggatgacgctagtgattgtggtcgtctatgtgctgtg

SEQ ID NO: 31726 - DNA, 60 bp, Homo sapiens
ggatcccgagccaacttgtttcctccgttagtggtggggaagggcttatccttttgtggc

SEQ ID NO: 31727 - DNA, 60 bp, Homo sapiens
ttcctaaaggagccacctgggatattctcaacctggcagatgcgttactagagcaggcca

SEQ ID NO: 31728 - DNA, 60 bp, Homo sapiens
caatctcatgcttgagtctctctgtctccaactgcctgtcacttgtctttgtgtctctgt

SEQ ID NO: 31729 - DNA, 60 bp, Homo sapiens
ctacttagtgactacattcgtcttattgctgcagtgaaaggtgtgtttgaccatcgaatg

SEQ ID NO: 31730 - DNA, 60 bp, Homo sapiens
aatcagacatttggtttgaggagaagctccaggaggtagagtgtgaggagcagcgcttac

SEQ ID NO: 31731 - DNA, 60 bp, Homo sapiens
catctgataaaacttacagccccctacaccaagagtgtatctgtgaaagagctcctacac

SEQ ID NO: 31732 - DNA, 60 bp, Homo sapiens
gcctttctgtaaccaaaaatccctgtaggcgtgctagcaattccagggtggtccgggttt

SEQ ID NO: 31733 - DNA, 60 bp, Homo sapiens
cgtcatattgatgccctcgaagacaaaatcgatgaggaggtacgtcgtttcagagaaacc

SEQ ID NO: 31734 - DNA, 60 bp, Homo sapiens
ccttccccattgcccaccccgccatctcaatcagtcactgacttttgtttattctgtcct

SEQ ID NO: 31735 - DNA, 60 bp, Homo sapiens
agtgggtgaatgtgtgaaggtcttgcctgaatccatcaggacttgggaaacagagaaccc

SEQ ID NO: 31736 - DNA, 60 bp, Homo sapiens
agcaaatgcaataatgccctcacccctcctgagaggagccccctccctgtggagcctgtt

SEQ ID NO: 31737 - DNA, 60 bp, Homo sapiens
gacttcccctaaagttaatttgcctaccaggtcagccttcaaaaactgcaagccacaaaa

SEQ ID NO: 31738 - DNA, 60 bp, Homo sapiens
accctcaacatgaagatggtgatgccctcctggtttgacctgatggggctgagtccagat

SEQ ID NO: 31739 - DNA, 60 bp, Homo sapiens
ccctaaggaaatcaaatcccattgtcacctaactctgaagatctaaatagcccttggatc

SEQ ID NO: 31740 - DNA, 60 bp, Homo sapiens
taaagaaatgggtgtcccccaccccatcagctgggaaagcccaggccgcaggagtgggat

SEQ ID NO: 31741 - DNA, 60 bp, Homo sapiens
ccatgccaacggtgctaatacgataggctgaatgtctgaggctaccaggtttatcacata

SEQ ID NO: 31742 - DNA, 60 bp, Homo sapiens
aacatcagtgccagacacatttgccagcaaagtggcagccacccaggaccagtatgcaga

SEQ ID NO: 31743 - DNA, 60 bp, Homo sapiens
cctgtaggttggtacttcccccaaactgattataggtaacagtttaatcatctcacttgc

SEQ ID NO: 31744 - DNA, 60 bp, Homo sapiens
ttaggggaaaatgaagtggctcttgcagctagagttgactcagaagccgaaattcctaga

SEQ ID NO: 31745 - DNA, 60 bp, Homo sapiens
cgggctgtagatcaggtttgcccacttgattgagaaagatgttccagtgaggaaccctga

SEQ ID NO: 31746 - DNA, 60 bp, Homo sapiens
ggatcattcctcatgtataatgtgccccaaatgcagcttcattttccagataccttgacg

SEQ ID NO: 31747 - DNA, 60 bp, Homo sapiens
ggagctgcttatgtctgcacttagcccttgtctactatgattttttccagatgtttccta

SEQ ID NO: 31748 - DNA, 60 bp, Homo sapiens; identical to SEQ ID NO: 7221

SEQ ID NO: 31749 - DNA, 60 bp, Homo sapiens
ccaacaaaacttcagactgtaaaattgccaggatgcagttttccccttgattggcgtgtg

SEQ ID NO: 31750 - DNA, 60 bp, Homo sapiens
actactattccagttctcctgtgtcagtcttgcctatagattttgccatcgttttctgtc

SEQ ID NO: 31751 - DNA, 60 bp, Homo sapiens
caggggaagaccgtctttggggtggacagatgcccactgaagagctttggaagtcaaaga

SEQ ID NO: 31752 - DNA, 60 bp, Homo sapiens
gtttgtgctaatttgggaattgtgtactccgaaacaagtagaaaagtgctgtttgaggga

SEQ ID NO: 31753 - DNA, 60 bp, Homo sapiens
aatgtcaccagccaacccctcactacattctccggttccagatgcttctcattcccctcg

SEQ ID NO: 31754 - DNA, 60 bp, Homo sapiens
ggaagaagcagtaaacagttgggaaatgcagtcactacctgagtataaggataaaaaggg

SEQ ID NO: 31755 - DNA, 60 bp, Homo sapiens
tcaagaccctaggagacgcctatgagtttgcggtggacgtgagagacttctcacctgaag

SEQ ID NO: 31756 - DNA, 60 bp, Homo sapiens; identical to SEQ ID NO: 15693

SEQ ID NO: 31757 - DNA, 60 bp, Homo sapiens
ccagtaaataccagctcgtagcagttggcaggtgcatgtctagataaaatttcttgcagc

SEQ ID NO: 31758 - DNA, 60 bp, Homo sapiens
gcgtttagatgccaaccatattacctcagtccccgaggacagttttgaaggacttgttca

SEQ ID NO: 31759 - DNA, 60 bp, Homo sapiens
cttctaaagttgccagatcttcgatctttaaacaacatgcactctgaggagctcttggcc

SEQ ID NO: 31760 - DNA, 60 bp, Homo sapiens
gatcttggataggatcatccatcacacctcatttgaagtgatgaaggacaatcctttggt

SEQ ID NO: 31761 - DNA, 60 bp, Homo sapiens
tctagggaggggacagaagatagtgccttgcacgggattgaggaactgaagaaggtggct

SEQ ID NO: 31762 - DNA, 60 bp, Homo sapiens
agctgtgatctaaggaggctggagatgtattgcgcacccctcaagcctgccaagtcagct

SEQ ID NO: 31763 - DNA, 60 bp, Homo sapiens; identical to SEQ ID NO: 14849

SEQ ID NO: 31764 - DNA, 60 bp, Homo sapiens
gcgtctcgggattgtgtttgacttgtgtctgtccaagaacttttcccccaaagatgtgta

SEQ ID NO: 31765 - DNA, 60 bp, Homo sapiens
cctggcattccacctagtgctaatgcacatcagctttttcgggggtttagttttgttgct

SEQ ID NO: 31766 - DNA, 60 bp, Homo sapiens
atggacagatggaccaaaagatgggtggttgaatgatttcccactcagggctggggccaa

SEQ ID NO: 31767 - DNA, 60 bp, Homo sapiens
gaatatttcacacatcccttcttttgaatggcctctttgtgaccagccagacctcaggtc

SEQ ID NO: 31768 - DNA, 60 bp, Homo sapiens
gtgattcgggggctgacctagaccagtttgcatgattcttctcttgtgatttggttgcac

SEQ ID NO: 31769 - DNA, 60 bp, Homo sapiens
aacacacacagcggggaagctgggccgagtaccttaatctgccataaagccattcttact

SEQ ID NO: 31770 - DNA, 60 bp, Homo sapiens
gctgggacgttagaattaggccatgatactggtctcattttaactacagtggtatttggc

SEQ ID NO: 31771 - DNA, 60 bp, Homo sapiens
aaggcagcacagttgccaggcttatgtgagacagacaggatggatggtgcggtcaccagt

SEQ ID NO: 31772 - DNA, 60 bp, Homo sapiens
ctcacatggtacactacccaacggaagtggatggaagtggagcagttccaatgtgctgac

SEQ ID NO: 31773 - DNA, 60 bp, Homo sapiens; identical to SEQ ID NO: 14771

SEQ ID NO: 31774 - DNA, 60 bp, Homo sapiens
agtctcgtggccgcccctggaccagtgatgactgatgaatcttatgagcttctgattgat

SEQ ID NO: 31775 - DNA, 60 bp, Homo sapiens
atgtggtaaaggtccgattccaagctcaggcccgggctggaggtggtcggagataccaaa

SEQ ID NO: 31776 - DNA, 60 bp, Homo sapiens
tgctgagatcctcatttatgtttgtagttggaaagcaaagctaggtagccatttcttctg

SEQ ID NO: 31777 - DNA, 60 bp, Homo sapiens
ccagcaacaactttggtgccattctctcatctaccaacgtgggatccaatacatatggca

SEQ ID NO: 31778 - DNA, 60 bp, Homo sapiens; identical to SEQ ID NO: 8984

SEQ ID NO: 31779 - DNA, 60 bp, Homo sapiens
ctggaggattttccagttctgacacacgtatttatatttggaaagagaccagcaccgagc

SEQ ID NO: 31780 - DNA, 60 bp, Homo sapiens
aatagaaccctgagcactggaggaagagcgctgtgctgtggtcttatcctatgtggaatc

SEQ ID NO: 31781 - DNA, 60 bp, Homo sapiens
ccactgctcttcagctcccagagtcaccaatggttccacttacatacttgtccctctaag

SEQ ID NO: 31782 - DNA, 60 bp, Homo sapiens
ggaggagctcctggataatttccatctgatggccccttctgaagaggatcattccatcct

SEQ ID NO: 31783 - DNA, 60 bp, Homo sapiens
tagggcactctgggaacctataaaggcaggtatttcgggccctcctcttcaggaatcttc

SEQ ID NO: 31784 - DNA, 60 bp, Homo sapiens; identical to SEQ ID NO: 14837

SEQ ID NO: 31785 - DNA, 60 bp, Homo sapiens; identical to SEQ ID NO: 5427

SEQ ID NO: 31786 - DNA, 60 bp, Homo sapiens
agagatagtcaaagaggttggtcaactggcagaaacccaacgcttcgaatgcaccacgca

SEQ ID NO: 31787 - DNA, 60 bp, Homo sapiens
aggttctcaacgtgaaggaaggaacccccagctgaaccagcaatgataatgatggcctct

SEQ ID NO: 31788 - DNA, 60 bp, Homo sapiens
agatggcaatggaagctcctcctgccccactgggagtagcggctaaagctgggggataga

SEQ ID NO: 31789 - DNA, 60 bp, Homo sapiens
gggaaagtgcaagtggatgcattcctgagtcttccagagcctaagaaaatcatcttggcc

SEQ ID NO: 31790 - DNA, 60 bp, Homo sapiens
ctgatggggtggaaggcatggcggcccccccagctgtcatcaattaaaggcaaaggcaat

SEQ ID NO: 31791 - DNA, 60 bp, Homo sapiens
gtcctatctgccagcaatctggctgctgctgagccaactccttagagaaagcctagcagc

SEQ ID NO: 31792 - DNA, 60 bp, Homo sapiens; identical to SEQ ID NO: 9986

SEQ ID NO: 31793 - DNA, 60 bp, Homo sapiens
gactgtaaactcctcgtgagtaggaaccctgtctcagtgcattttgttttcctgcttcct

SEQ ID NO: 31794 - DNA, 60 bp, Homo sapiens; identical to SEQ ID NO: 15080

SEQ ID NO: 31795 - DNA, 60 bp, Homo sapiens
gggacacccgttcttccgaaatgttgattgggatatgatggagcaaaaacaggtggtacc

SEQ ID NO: 31796 - DNA, 60 bp, Homo sapiens
ttctcctgagctaggaagagtctacccgacataagtcgagggactttatgtttttgaggc

SEQ ID NO: 31797 - DNA, 60 bp, Homo sapiens
gcaggacgactgttttcccaacacgggtaaatctagtaccatgtcgtagttactctcagg

SEQ ID NO: 31798 - DNA, 60 bp, Homo sapiens
cagtgtggccctaaattacagcgtcatcaaggagtcagaccatttcagcacagagcttga

SEQ ID NO: 31799 - DNA, 60 bp, Homo sapiens
cttacatagaccctgatgccctcaaagagctccccctcctaaagttccttggcattttca

SEQ ID NO: 31800 - DNA, 60 bp, Homo sapiens
ttgcaagggaacctcctagcactgtgaaagtcagaatcgcctcagcatttccatgacgca

SEQ ID NO: 31801 - DNA, 60 bp, Homo sapiens
tcgaggctgctgctacatggtattactctctggagcactccacggatgactatgcctcct

SEQ ID NO: 31802 - DNA, 60 bp, Homo sapiens; identical to SEQ ID NO: 20124

SEQ ID NO: 31803 - DNA, 60 bp, Homo sapiens
tgtggtgaaaggctgtggcttcagtcctgggtttctgcctgtgtgactctggataagtca

SEQ ID NO: 31804 - DNA, 60 bp, Homo sapiens
cactagcataagcacactcccagcagccaatggagcaggaccacttcaaaactggtagaa

SEQ ID NO: 31805 - DNA, 60 bp, Homo sapiens
tgccttgctgtgacccatgtgccacgtgctactgccgcttcttcaatgccttctgctact

SEQ ID NO: 31806 - DNA, 60 bp, Homo sapiens
aatcccatgacaaatcgttctacagtttccaaatctatcttggaccagtcaatttcctcc

SEQ ID NO: 31807 - DNA, 60 bp, Homo sapiens; identical to SEQ ID NO: 20070

SEQ ID NO: 31808 - DNA, 60 bp, Homo sapiens
gtagtaggcttaaaaaaaatcttaactctgctacatggctctgactgctgtgggggattg

SEQ ID NO: 31809 - DNA, 60 bp, Homo sapiens
ggctttctgtaaaaggtactatagaagggcgaagaatcgttcaactgtcaatcagcctct

SEQ ID NO: 31810 - DNA, 60 bp, Homo sapiens
gatgaaaactgtcactttagcatgtaatccattacagaatcccatgcagtgattccagga

SEQ ID NO: 31811 - DNA, 60 bp, Homo sapiens
cccaaagtcctcactcagaccagtgcccctccagttcagttgtctatgtattaccttcct

SEQ ID NO: 31812 - DNA, 60 bp, Homo sapiens
aatgtcaggtgtggagttgggcggacaagagtctgctgatgaggacaacctaaaagagca

SEQ ID NO: 31813 - DNA, 60 bp, Homo sapiens; identical to SEQ ID NO: 4855

SEQ ID NO: 31814 - DNA, 60 bp, Homo sapiens; identical to SEQ ID NO: 31517

SEQ ID NO: 31815 - DNA, 60 bp, Homo sapiens; identical to SEQ ID NO: 31518

SEQ ID NO: 31816 - DNA, 60 bp, Homo sapiens; identical to SEQ ID NO: 31519

SEQ ID NO: 31817 - DNA, 60 bp, Homo sapiens
tgtgtttacgcgccccatcctgtgtgtcccagccttttgagcagaaactgccaggcagga

SEQ ID NO: 31818 - DNA, 60 bp, Homo sapiens
tgggaggggagcctggctgccctgctgcttctcctgcctaataaacaggcttctcctgca

SEQ ID NO: 31819 - DNA, 60 bp, Homo sapiens
taccctctcagcccaggccacacctctgctgcatgcactcactgctgcccatgcctacat

SEQ ID NO: 31820 - DNA, 60 bp, Homo sapiens
ccaggggattccatgctcaatggatgaatgtagacacaaaacagcaacacttgtatgaag

SEQ ID NO: 31821 - DNA, 60 bp, Homo sapiens
tctccgtaaaccagtggggctctcaattgggtctgagtgttttgagcaagctgagccagt

SEQ ID NO: 31822 - DNA, 60 bp, Homo sapiens
tgtttggtgattgtggcgctcgcgacagacagggaggcggtggcagaggacacttgtcat

SEQ ID NO: 31823 - DNA, 60 bp, Homo sapiens
ggaaactgaagcatgtgccattctatactgtcattccaaattctcatggactattgcctg

SEQ ID NO: 31824 - DNA, 60 bp, Homo sapiens; identical to SEQ ID NO: 31723

SEQ ID NO: 31825 - DNA, 60 bp, Homo sapiens; identical to SEQ ID NO: 31724

SEQ ID NO: 31826 - DNA, 60 bp, Homo sapiens
gaaggccactggtagctaacgtgtccgaaaccagttaagaatggaagaaaacggtgcatc

SEQ ID NO: 31827 - DNA, 60 bp, Homo sapiens; identical to SEQ ID NO: 31725

SEQ ID NO: 31828 - DNA, 60 bp, Homo sapiens
cgactttagggcgatggggactctcaacttctgtgaaaattttatgctcgactagggcac

SEQ ID NO: 31829 - DNA, 60 bp, Homo sapiens
cgtcaagtcatggagaagagggttgtgatgagttctggagggcatcaacatttggtcagc

SEQ ID NO: 31830 - DNA, 60 bp, Homo sapiens
tgggcatgaatgcatcagtgacaattgaaggaacatctgctgtgtacaaactcccaattg

SEQ ID NO: 31831 - DNA, 60 bp, Homo sapiens
atcttggaaatcctcaatgcctgggagaatggggtcctggccttcgagtccatccagaaa

SEQ ID NO: 31832 - DNA, 60 bp, Homo sapiens
acatctttgacaccctgctgcacatgggcggcgtctactggttctgcaacaacctgatta

SEQ ID NO: 31833 - DNA, 60 bp, Homo sapiens
tgctcttgccaagctggccgtgtggtgtgccctcagttcctactcctcccacaagggaca

SEQ ID NO: 31834 - DNA, 60 bp, Homo sapiens
tcacatccgctccacatggtgcaagagcctctagcggcttccagttccccgctcctgact

SEQ ID NO: 31835 - DNA, 60 bp, Homo sapiens; identical to SEQ ID NO: 31728

SEQ ID NO: 31836 - DNA, 60 bp, Homo sapiens
ttaatacacaggctctgagtggagcaggaatattgaggatggtgaacaaggctgccgacg

SEQ ID NO: 31837 - DNA, 60 bp, Homo sapiens; identical to SEQ ID NO: 31729

SEQ ID NO: 31838 - DNA, 60 bp, Homo sapiens
aagattgttgccgttaagaagaccttggatgttgttccagttatgctggattccacagtg

SEQ ID NO: 31839 - DNA, 60 bp, Homo sapiens
gatgccacagtggagctatccttggacagcacacaaaataatcagaagaaggtgctagcc

SEQ ID NO: 31840 - DNA, 60 bp, Homo sapiens
ttgcaaagagtctagccatgcttgggagctctgaggacaacacggcattgtcacgggcac

SEQ ID NO: 31841 - DNA, 60 bp, Homo sapiens
cgggtgactcaatatgaaagggacttcgagaggatttcaacagtggtccgaaaagaagtg

SEQ ID NO: 31842 - DNA, 60 bp, Homo sapiens
cctttttatacactgtcctcctccaccttgatggacccctagtgatgcatcctgcctagg

SEQ ID NO: 31843 - DNA, 60 bp, Homo sapiens
agatgcgagggcatgctgttccaatcctctcagccatccaagttgaaattctcagcccac

SEQ ID NO: 31844 - DNA, 60 bp, Homo sapiens; identical to SEQ ID NO: 31731

SEQ ID NO: 31845 - DNA, 60 bp, Homo sapiens; identical to SEQ ID NO: 31732

SEQ ID NO: 31846 - DNA, 60 bp, Homo sapiens; identical to SEQ ID NO: 31733

SEQ ID NO: 31847 - DNA, 60 bp, Homo sapiens; identical to SEQ ID NO: 31734

SEQ ID NO: 31848 - DNA, 60 bp, Homo sapiens; identical to SEQ ID NO: 31735

SEQ ID NO: 31849 - DNA, 60 bp, Homo sapiens
tttgccttccctgacgagttcgtctttgacgtctggggcgccattggggacgccaaggtc

SEQ ID NO: 31850 - DNA, 60 bp, Homo sapiens
tgtgatgtgaagtgacttgccccccagccacacagttggaccattttggctgctgtctgg

SEQ ID NO: 31851 - DNA, 60 bp, Homo sapiens; identical to SEQ ID NO: 31736

SEQ ID NO: 31852 - DNA, 60 bp, Homo sapiens; identical to SEQ ID NO: 31737

SEQ ID NO: 31853 - DNA, 60 bp, Homo sapiens
gcctgtggtgggaacagccagcattattgaagtttcggctttaggaagatatcacatggc

SEQ ID NO: 31854 - DNA, 60 bp, Homo sapiens
gtcagacctagaagaaagatcagtagaacaagactctacagaactgtttaccaaccacag

SEQ ID NO: 31855 - DNA, 60 bp, Homo sapiens
tcttcattcttccccttagcactggtgcagctgaatttgatcctttgtgtattcctgtca

SEQ ID NO: 31856 - DNA, 60 bp, Homo sapiens
caatggtggaagggcatttaaaggaacttgaagaggatgcttgatttaatgctttccaga

SEQ ID NO: 31857 - DNA, 60 bp, Homo sapiens
ctagtacattaacatccccttttcattaccccattgggtggcaccttttaaaaacccagg

SEQ ID NO: 31858 - DNA, 60 bp, Homo sapiens; identical to SEQ ID NO: 31738

SEQ ID NO: 31859 - DNA, 60 bp, Homo sapiens
tgacggctgagaagctccggtctgttgtcacacctgccagggtccagttcaagacatacc

SEQ ID NO: 31860 - DNA, 60 bp, Homo sapiens
tccccattcttggaagaggttgagaagactcctgggcttcagcctctcccacccagccct

SEQ ID NO: 31861 - DNA, 60 bp, Homo sapiens; identical to SEQ ID NO: 31739

SEQ ID NO: 31862 - DNA, 60 bp, Homo sapiens
ttgtcaccaggaaggcgatcttgactctgctgagaaccgtgggggccgaatactgcttcc

SEQ ID NO: 31863 - DNA, 60 bp, Homo sapiens
tttattggctgaggacagggattgcgggggagctgtcaggcccctggcaggttagaaaag

SEQ ID NO: 31864 - DNA, 60 bp, Homo sapiens
tgtgacctgtgtggatgtcttccgtcccagcaacccctgggagctggccaagactgtttt

SEQ ID NO: 31865 - DNA, 60 bp, Homo sapiens
ctaaccccgccttccagcactttctgtcattccaggctgggaaagtctagagcccccttt

SEQ ID NO: 31866 - DNA, 60 bp, Homo sapiens; identical to SEQ ID NO: 31740

SEQ ID NO: 31867 - DNA, 60 bp, Homo sapiens; identical to SEQ ID NO: 31741

SEQ ID NO: 31868 - DNA, 60 bp, Homo sapiens
attggagagccccgcctggtggagatgagtgagaagaaagccctgttattgaatgagctt

SEQ ID NO: 31869 - DNA, 60 bp, Homo sapiens; identical to SEQ ID NO: 31742

SEQ ID NO: 31870 - DNA, 60 bp, Homo sapiens
tttaggcctgattctatttgaattgctgtatccattcagcactcagatggagagagtcag

SEQ ID NO: 31871 - DNA, 60 bp, Homo sapiens; identical to SEQ ID NO: 31743

SEQ ID NO: 31872 - DNA, 60 bp, Homo sapiens; identical to SEQ ID NO: 31744

SEQ ID NO: 31873 - DNA, 60 bp, Homo sapiens; identical to SEQ ID NO: 31745

SEQ ID NO: 31874 - DNA, 60 bp, Homo sapiens
gttgttgtccctcgtgaccagacacctgatgagaatgaccaagtggttgtcaaaataact

SEQ ID NO: 31875 - DNA, 60 bp, Homo sapiens; identical to SEQ ID NO: 31746

SEQ ID NO: 31876 - DNA, 60 bp, Homo sapiens
caggggtgtgtgatgagagtgtattgtaatgtcaagctgagaacctacacattcaagcag

SEQ ID NO: 31877 - DNA, 60 bp, Homo sapiens; identical to SEQ ID NO: 31747

SEQ ID NO: 31878 - DNA, 60 bp, Homo sapiens; identical to SEQ ID NO: 7221

SEQ ID NO: 31879 - DNA, 60 bp, Homo sapiens
tcaagtcgcccaacagaaccacggcggtgaagcagtgggagcagcgctggatcaagaact

SEQ ID NO: 31880 - DNA, 60 bp, Homo sapiens; identical to SEQ ID NO: 31749

SEQ ID NO: 31881 - DNA, 60 bp, Homo sapiens
gttgtctgatccacaagggcaagatcttctgagtactctggggtgtgagtatgtgtgcac

SEQ ID NO: 31882 - DNA, 60 bp, Homo sapiens; identical to SEQ ID NO: 31750

SEQ ID NO: 31883 - DNA, 60 bp, Homo sapiens; identical to SEQ ID NO: 31751

SEQ ID NO: 31884 - DNA, 60 bp, Homo sapiens; identical to SEQ ID NO: 31752

SEQ ID NO: 31885 - DNA, 60 bp, Homo sapiens
tggctaatcttacactgccccctggtgggcgtccatagacactattgtttttaaaccagg

SEQ ID NO: 31886 - DNA, 60 bp, Homo sapiens
gtaagtttcatcacaaatcatgtcttttgcctcttttgttacccaggttcgatcaagggg

SEQ ID NO: 31887 - DNA, 60 bp, Homo sapiens
ccacggctgtgaattcctgccctaccatcaatacctgccactctgtacatcacaaagttg

SEQ ID NO: 31888 - DNA, 60 bp, Homo sapiens
gatagctggagacatcattacgtgaggagactttaaatatgagactggaactaaaggggg

SEQ ID NO: 31889 - DNA, 60 bp, Homo sapiens
cctgtatgagtgacataagggaattctaaattgatacaccatcaggattcaccctcaaga

SEQ ID NO: 31890 - DNA, 60 bp, Homo sapiens
gcatcatccccaaagaaaacgcagaggatattcagaaaagtgttgtcttacaggatgtac

SEQ ID NO: 31891 - DNA, 60 bp, Homo sapiens
aagagaaggagccagaacccccggatctgcatgcaaggcctgctccatgcctcgctcaca

SEQ ID NO: 31892 - DNA, 60 bp, Homo sapiens; identical to SEQ ID NO: 31755

SEQ ID NO: 31893 - DNA, 60 bp, Homo sapiens
ggagtcataggaaaagcccccatctcccatctgggatagggaccttccatcagccttaac

SEQ ID NO: 31894 - DNA, 60 bp, Homo sapiens
caggtctctagatcattctgttctcgagtatcctgtggaggaggcaaaaatgcctggcgc

SEQ ID NO: 31895 - DNA, 60 bp, Homo sapiens; identical to SEQ ID NO: 15693

SEQ ID NO: 31896 - DNA, 60 bp, Homo sapiens
gcctaccatgctccaggcattattctagcattgggaacacactgacaaacaaggcagaca

SEQ ID NO: 31897 - DNA, 60 bp, Homo sapiens; identical to SEQ ID NO: 31757

SEQ ID NO: 31898 - DNA, 60 bp, Homo sapiens
gggtgcttgagaaacattgaatgtatcattgtcaacagacaaagatacctccccttgtgg

SEQ ID NO: 31899 - DNA, 60 bp, Homo sapiens
catggctgaaggctgcgctctgcaaccttgaagagccgctgcattgagaggccagggaca

SEQ ID NO: 31900 - DNA, 60 bp, Homo sapiens
gttctaacgctccagaataatcagttgaaaacagtacccagtgaagccattcgagggctg

SEQ ID NO: 31901 - DNA, 60 bp, Homo sapiens; identical to SEQ ID NO: 31758

SEQ ID NO: 31902 - DNA, 60 bp, Homo sapiens
aaatgggaagagcaatcatctcaaacagttccgggttgctgccctttcggctttcctagg

SEQ ID NO: 31903 - DNA, 60 bp, Homo sapiens
aatatagtacgacgacacgtactgtatggggaacaaagagcctccactgagcctggcaag

SEQ ID NO: 31904 - DNA, 60 bp, Homo sapiens
gcatgattaagcatgtcgcttggctaatcttcaccaattgcatctttttctgccctgtgg

SEQ ID NO: 31905 - DNA, 60 bp, Homo sapiens; identical to SEQ ID NO: 31759

SEQ ID NO: 31906 - DNA, 60 bp, Homo sapiens; identical to SEQ ID NO: 31760

SEQ ID NO: 31907 - DNA, 60 bp, Homo sapiens; identical to SEQ ID NO: 31761

SEQ ID NO: 31908 - DNA, 60 bp, Homo sapiens
agatcctagagcctgacgttcagtgaacccatgtttctgggtgggtgaaaggggcccaac

SEQ ID NO: 31909 - DNA, 60 bp, Homo sapiens
cagaagcaatgggaaaaatcagcagtcttccaacccaattatttaagtgctgcttttgtg

SEQ ID NO: 31910 - DNA, 60 bp, Homo sapiens; identical to SEQ ID NO: 31762

SEQ ID NO: 31911 - DNA, 60 bp, Homo sapiens
gtgacatgccaccgcaggatcctttgctctgcacgagttacctgttaaactttggaacac

SEQ ID NO: 31912 - DNA, 60 bp, Homo sapiens
gattaaacagacagaggcaaggatgatgagagaggagcagacagcaagaatgaaaagcag

SEQ ID NO: 31913 - DNA, 60 bp, Homo sapiens; identical to SEQ ID NO: 14849

SEQ ID NO: 31914 - DNA, 60 bp, Homo sapiens
ccctatgtgttggttgcggcaatcagattcacgatcagtatattctgagggtttctccgg

SEQ ID NO: 31915 - DNA, 60 bp, Homo sapiens
gaaccctgtgagctaaaggtaaggtggttatatatctagttttcccagagcagtagcagt

SEQ ID NO: 31916 - DNA, 60 bp, Homo sapiens
gttcacctggattaacagtattgttggacagtcctaaaaatggccagattgtggaacagc

SEQ ID NO: 31917 - DNA, 60 bp, Homo sapiens; identical to SEQ ID NO: 31766

SEQ ID NO: 31918 - DNA, 60 bp, Homo sapiens; identical to SEQ ID NO: 31767

SEQ ID NO: 31919 - DNA, 60 bp, Homo sapiens; identical to SEQ ID NO: 31768

SEQ ID NO: 31920 - DNA, 60 bp, Homo sapiens; identical to SEQ ID NO: 31769

SEQ ID NO: 31921 - DNA, 60 bp, Homo sapiens; identical to SEQ ID NO: 31770

SEQ ID NO: 31922 - DNA, 60 bp, Homo sapiens
agagagtaagactgtgaagcctaaaatgactggctgagaatgaaccagaaatgccatttg

SEQ ID NO: 31923 - DNA, 60 bp, Homo sapiens
tactgcaagactcacatattggttggaaatttccctcaaatcacctaccgattacccttg

SEQ ID NO: 31924 - DNA, 60 bp, Homo sapiens
aagtttttcaacatgagtggcctcggggacagttcatccgaccctgctaacccagactca

SEQ ID NO: 31925 - DNA, 60 bp, Homo sapiens
gattgtagccaatgttgccttaaaccaaggacaggccagttcacagagcagtaatccctc

SEQ ID NO: 31926 - DNA, 60 bp, Homo sapiens
tatgaatgaaggacccaataactccgttggcttctctgccagttctccagtcctcaggca

SEQ ID NO: 31927 - DNA, 60 bp, Homo sapiens
gcccagatgcagatgagctctttgcagatgccaggaatgaacactgtgtgccctgagcag

SEQ ID NO: 31928 - DNA, 60 bp, Homo sapiens
ctctactgcaaccagctctcatccactgaccttctcaaaacagaagcagatggaacccag

SEQ ID NO: 31929 - DNA, 60 bp, Homo sapiens
ggatttaaaccaagatgcctccaggaaagaggacgaaatgagtatattcacagaggaatc

SEQ ID NO: 31930 - DNA, 60 bp, Homo sapiens
cagtattgggtcagattgtttccagatatcttccttgaaaactaatcctgtgagttgcag

SEQ ID NO: 31931 - DNA, 60 bp, Homo sapiens
gcaaggccaggaaagcttgagaaaggtattgtggaagaagcaaaggtagacccccatcac

SEQ ID NO: 31932 - DNA, 60 bp, Homo sapiens; identical to SEQ ID NO: 31772

SEQ ID NO: 31933 - DNA, 60 bp, Homo sapiens; identical to SEQ ID NO: 14771

SEQ ID NO: 31934 - DNA, 60 bp, Homo sapiens
ctcccagagaaagctctccactctgaaagatgaaagttctcgggcctggacagaatctag

SEQ ID NO: 31935 - DNA, 60 bp, Homo sapiens
ttgcctgtcggtgaggcaggtttttactgtgaggtgaacgtggacctgtttctgtttcca

SEQ ID NO: 31936 - DNA, 60 bp, Homo sapiens; identical to SEQ ID NO: 31774

SEQ ID NO: 31937 - DNA, 60 bp, Homo sapiens; identical to SEQ ID NO: 10399

SEQ ID NO: 31938 - DNA, 60 bp, Homo sapiens; identical to SEQ ID NO: 31775

SEQ ID NO: 31939 - DNA, 60 bp, Homo sapiens
tcacctatgagcagctgaaacgagccctcatggctgcctgcacttcccgagaggctccct

SEQ ID NO: 31940 - DNA, 60 bp, Homo sapiens
tgctgtcaggggccgagatctttgctgagctgggagaagtgattaagggagtgaaaccag

SEQ ID NO: 31941 - DNA, 60 bp, Homo sapiens; identical to SEQ ID NO: 31776

SEQ ID NO: 31942 - DNA, 60 bp, Homo sapiens
ccgggggtatataagagctggattactagttagcaaatgagggggtaaatattccagtgg

SEQ ID NO: 31943 - DNA, 60 bp, Homo sapiens; identical to SEQ ID NO: 31777

SEQ ID NO: 31944 - DNA, 60 bp, Homo sapiens; identical to SEQ ID NO: 8984

SEQ ID NO: 31945 - DNA, 60 bp, Homo sapiens; identical to SEQ ID NO: 31779

SEQ ID NO: 31946 - DNA, 60 bp, Homo sapiens; identical to SEQ ID NO: 31780

SEQ ID NO: 31947 - DNA, 60 bp, Homo sapiens; identical to SEQ ID NO: 31781

SEQ ID NO: 31948 - DNA, 60 bp, Homo sapiens
ggtcctttacagtgagagtcagtgaaaatcaggttagggaatgtggccatcctcatggcc

SEQ ID NO: 31949 - DNA, 60 bp, Homo sapiens; identical to SEQ ID NO: 31782

SEQ ID NO: 31950 - DNA, 60 bp, Homo sapiens; identical to SEQ ID NO: 31783

SEQ ID NO: 31951 - DNA, 60 bp, Homo sapiens; identical to SEQ ID NO: 14837

SEQ ID NO: 31952 - DNA, 60 bp, Homo sapiens; identical to SEQ ID NO: 5427

SEQ ID NO: 31953 - DNA, 60 bp, Homo sapiens
ctcattttgtccccagtggctaagaaactaaaggcaagccagcaagtgtctctgagtttc

SEQ ID NO: 31954 - DNA, 60 bp, Homo sapiens; identical to SEQ ID NO: 31786

SEQ ID NO: 31955 - DNA, 60 bp, Homo sapiens
cccaaggccctgggcaatcagcagccttcgtgggattcagaggatagcagcaacttcaaa

SEQ ID NO: 31956 - DNA, 60 bp, Homo sapiens; identical to SEQ ID NO: 31788

SEQ ID NO: 31957 - DNA, 60 bp, Homo sapiens
atacatatgcagcacgcctcacaggtttgagctatggcattgcatcaggaatgaatgcaa

SEQ ID NO: 31958 - DNA, 60 bp, Homo sapiens
cataaggtatccgtccatgttcttgccagggaaatggattcttgtcctgttgttggagag

SEQ ID NO: 31959 - DNA, 60 bp, Homo sapiens; identical to SEQ ID NO: 31790

SEQ ID NO: 31960 - DNA, 60 bp, Homo sapiens; identical to SEQ ID NO: 31791

SEQ ID NO: 31961 - DNA, 60 bp, Homo sapiens
agggcagccatcattgaagaaaataatactttcccgcaaaaagagaagtggacgtcacag

SEQ ID NO: 31962 - DNA, 60 bp, Homo sapiens; identical to SEQ ID NO: 9986

SEQ ID NO: 31963 - DNA, 60 bp, Homo sapiens; identical to SEQ ID NO: 31793

SEQ ID NO: 31964 - DNA, 60 bp, Homo sapiens; identical to SEQ ID NO: 15080

SEQ ID NO: 31965 - DNA, 60 bp, Homo sapiens; identical to SEQ ID NO: 31795

SEQ ID NO: 31966 - DNA, 60 bp, Homo sapiens
aattgaatgtgggcggcattctttgccacaggaaccagtgatgcccatggatcagtcatc

SEQ ID NO: 31967 - DNA, 60 bp, Homo sapiens
caaccatgtattctactcatgttgccatttaatgcatggataaacttgctgcaagcctgg

SEQ ID NO: 31968 - DNA, 60 bp, Homo sapiens
gcaaaacgaattctagagcttgaccagtttaaggggcagcagggacaaaaacgtttccaa

SEQ ID NO: 31969 - DNA, 60 bp, Homo sapiens
aagaggagctgaagacccacatcagcaagggtacgctgggcaagttcactgtgcccatgc

SEQ ID NO: 31970 - DNA, 60 bp, Homo sapiens; identical to SEQ ID NO: 31796

SEQ ID NO: 31971 - DNA, 60 bp, Homo sapiens
tggcactaaatccacactgcccatctcggagacaggcggaggaactcccgagctgagatg

SEQ ID NO: 31972 - DNA, 60 bp, Homo sapiens; identical to SEQ ID NO: 31797

SEQ ID NO: 31973 - DNA, 60 bp, Homo sapiens; identical to SEQ ID NO: 31798

SEQ ID NO: 31974 - DNA, 60 bp, Homo sapiens
ggaagtctttctgagtagcaataagtgggaattatgggcagagcacactcaatcccctgt

SEQ ID NO: 31975 - DNA, 60 bp, Homo sapiens
ctgtttttcctattttgtagggctgctgactcctagtccttgaagcctagacacatgacc

SEQ ID NO: 31976 - DNA, 60 bp, Homo sapiens
gaagaaagtccttgtcctttgagactcagaaggccccacgctccagtatgccatcatgat

SEQ ID NO: 31977 - DNA, 60 bp, Homo sapiens
gtcactcgttgttttgcagaagaagcctttcaagcaatcactgacttcaatgacctcccc

SEQ ID NO: 31978 - DNA, 60 bp, Homo sapiens
ccttccttgttatcaagcctctcggacaaaagggctaggaaaaggtgatatgtctcctga

SEQ ID NO: 31979 - DNA, 60 bp, Homo sapiens; identical to SEQ ID NO: 31800

SEQ ID NO: 31980 - DNA, 60 bp, Homo sapiens; identical to SEQ ID NO: 31801

SEQ ID NO: 31981 - DNA, 60 bp, Homo sapiens
tttgtaccccgtgctggtggagagaactacaaggagttcagtgagctgctccccaatcga

SEQ ID NO: 31982 - DNA, 60 bp, Homo sapiens; identical to SEQ ID NO: 20124

SEQ ID NO: 31983 - DNA, 60 bp, Homo sapiens; identical to SEQ ID NO: 31803

SEQ ID NO: 31984 - DNA, 60 bp, Homo sapiens
atcgtcatggagtgcagcaccgtgttcccaggcttagccaataaaaccaccctctttacg

SEQ ID NO: 31985 - DNA, 60 bp, Homo sapiens; identical to SEQ ID NO: 31804

SEQ ID NO: 31986 - DNA, 60 bp, Homo sapiens; identical to SEQ ID NO: 31805

SEQ ID NO: 31987 - DNA, 60 bp, Homo sapiens
aactgtggacaactggagccagatccagagcttcgaggccaaaccagatgatctcctcat

SEQ ID NO: 31988 - DNA, 60 bp, Homo sapiens; identical to SEQ ID NO: 20070

SEQ ID NO: 31989 - DNA, 60 bp, Homo sapiens; identical to SEQ ID NO: 31808

SEQ ID NO: 31990 - DNA, 60 bp, Homo sapiens; identical to SEQ ID NO: 31809

SEQ ID NO: 31991 - DNA, 60 bp, Homo sapiens
ttttactgtgactcttcccattctctttggcaagaagtccccttctcgcccccaaaccag

SEQ ID NO: 31992 - DNA, 60 bp, Homo sapiens
gagctgaagcaggacaacatagcggtgaaggcgaacgcggtctgcaagctgacgtattta

SEQ ID NO: 31993 - DNA, 60 bp, Homo sapiens
ggttcagtcggctgccgtcaatgtcatctgcgagctggccagacgcaaccctaagaacta

SEQ ID NO: 31994 - DNA, 60 bp, Homo sapiens
agattgacctctccgtccccttgaaggttccagggctgcctatgtcagatcagtatgtga

SEQ ID NO: 31995 - DNA, 60 bp, Homo sapiens
aaattcctatgttaaaatgacctgtgacatccggggcagtctgcaggaggacagccaggt

SEQ ID NO: 31996 - DNA, 60 bp, Homo sapiens
ttgttagaagagatgaaggcgacgctggccaagtgttgagagctgcctgcgagccccgca

SEQ ID NO: 31997 - DNA, 60 bp, Homo sapiens
cctcagtcgtgtgtactgtacccaagcctgagtgttaatttaactctatgttgtccgccg

SEQ ID NO: 31998 - DNA, 60 bp, Homo sapiens; identical to SEQ ID NO: 31810

SEQ ID NO: 31999 - DNA, 60 bp, Homo sapiens
ggatgggtcagcggaggctcttgcgagcttgagctttgagctgagattttcaggaagcca

SEQ ID NO: 32000 - DNA, 60 bp, Homo sapiens
acaaagacttggaagggtttaagactctgacattcctggctgtcatgctcattgttctga

SEQ ID NO: 32001 - DNA, 60 bp, Homo sapiens
agaatgcctttgtgtgcatctacctcatcagctgcttcacccagctcatcgacctgtcca

SEQ ID NO: 32002 - DNA, 60 bp, Homo sapiens
ggtccctgtcaaggaatggaacggctcctgaccccaaagtccagatgtttggctggtcag

SEQ ID NO: 32003 - DNA, 60 bp, Homo sapiens
agtgcttgatgaagccaccagtgccctgacagaggaagtggagagcgagctctatcgcat

SEQ ID NO: 32004 - DNA, 60 bp, Homo sapiens; identical to SEQ ID NO: 31811

SEQ ID NO: 32005 - DNA, 60 bp, Homo sapiens
gtcttggtgccaattttagtgttagttgtatttgagcacaaagggctaggtaaaggggtc

SEQ ID NO: 32006 - DNA, 60 bp, Homo sapiens
tctgggagaggtcaccagtgccatgagtggggctcgagggcagctccattgttctcaatg

SEQ ID NO: 32007 - DNA, 60 bp, Homo sapiens; identical to SEQ ID NO: 6676

SEQ ID NO: 32008 - DNA, 60 bp, Homo sapiens; identical to SEQ ID NO: 4855

SEQ ID NO: 32009 - DNA, 60 bp, Homo sapiens; identical to SEQ ID NO: 31517

SEQ ID NO: 32010 - DNA, 60 bp, Homo sapiens; identical to SEQ ID NO: 31518

SEQ ID NO: 32011 - DNA, 60 bp, Homo sapiens; identical to SEQ ID NO: 31519

SEQ ID NO: 32012 - DNA, 60 bp, Homo sapiens; identical to SEQ ID NO: 31302

SEQ ID NO: 32013 - DNA, 60 bp, Homo sapiens; identical to SEQ ID NO: 31806

SEQ ID NO: 32014 - DNA, 60 bp, Homo sapiens
aagagcaccagaagtatatggtcccactgcaggcctcagcacaagagaagaatggactct

SEQ ID NO: 32015 - DNA, 60 bp, Homo sapiens
ccacccactcttcacaggctattctactttaaaggaagcctttttattttgctgcacaca

SEQ ID NO: 32016 - DNA, 60 bp, Homo sapiens
tatgtttctggtggaaaccaagttcaccctggctgggagcatctctgatgaggcatgctg

SEQ ID NO: 32017 - DNA, 60 bp, Homo sapiens
gccttaggcaatctttccaaagtaaattcagggccccattgctacttatgccatatttgg

SEQ ID NO: 32018 - DNA, 60 bp, Homo sapiens
ttgcttcccgctgcacatggacagacttcacagcgtctgctcataggacctgcatccttc

SEQ ID NO: 32019 - DNA, 60 bp, Homo sapiens
gagtggcaaaatatcaccaagggcttcagtgaagacaggctcttgattgcggggactaac

SEQ ID NO: 32020 - DNA, 60 bp, Homo sapiens
cccacaatgctccaatttcctgtctcctttagagagacatgaaactatcacaggtgctgg

SEQ ID NO: 32021 - DNA, 60 bp, Homo sapiens
aggacctgctgcgggaggacctgaacaagaagcagacccagaaggacttggagtgtgcac

SEQ ID NO: 32022 - DNA, 60 bp, Homo sapiens; identical to SEQ ID NO: 22361

SEQ ID NO: 32023 - DNA, 60 bp, Homo sapiens
agagactgatcctagccaggcaccttaggagtatagggaggccccatataggtccatcct

SEQ ID NO: 32024 - DNA, 60 bp, Homo sapiens
aggttggcaagttgatcaaagaagctgccgggaaaagcaatctgaagagggtgaccctgg

SEQ ID NO: 32025 - DNA, 60 bp, Homo sapiens
gggcttctttgagctgttcccttctctaagccataatctcttagtggattgagccctctt

SEQ ID NO: 32026 - DNA, 60 bp, Homo sapiens
gtatcttggattaactgatgcctgctagtgctttctgattactcgcattctgtttcttgc

SEQ ID NO: 32027 - DNA, 60 bp, Homo sapiens
ctgtgacttcaagtgtcggatcttttcagcctacatcaaggaggtggaggaacggccggc

SEQ ID NO: 32028 - DNA, 60 bp, Homo sapiens
ggcactgttgcctatcagaagtcaattcaaaggacctgcccccagagagacaaaagatac

SEQ ID NO: 32029 - DNA, 60 bp, Homo sapiens
tcaggctggcttctgatgttcagtcccctgggccgggacagattttttttaacgtcttga

SEQ ID NO: 32030 - DNA, 60 bp, Homo sapiens
cttgctgctggaggagtagggtccattgttcgtgtcttgactgcaagaaaaactgtgtag

SEQ ID NO: 32031 - DNA, 60 bp, Homo sapiens
aaaaacaaccctaccccccattgccaccttcactcctgtgtctccagctgattagcctca

SEQ ID NO: 32032 - DNA, 60 bp, Homo sapiens
tagtattgaaatggccagtttacttgtctgccttcctttccaagaccgttggtgcctaga

SEQ ID NO: 32033 - DNA, 60 bp, Homo sapiens
atcatcacgggggaattctaccggatctattacctgaagaagtcgcggtcgacgattcag

SEQ ID NO: 32034 - DNA, 60 bp, Homo sapiens
taggttccagttttctcctaacacgtgccaagcccaggagcagttcttccctatggatac

SEQ ID NO: 32035 - DNA, 60 bp, Homo sapiens
ctgtcctcctgatgacctggctgaccgtgggctcctggatgtgaaatcttctttttatgg

SEQ ID NO: 32036 - DNA, 60 bp, Homo sapiens
tgacaccaatgagcagtcgctggagcaggtcttctcaaagtacggacagatctctgaagt

SEQ ID NO: 32037 - DNA, 60 bp, Homo sapiens
gagcaggcggaattgttggatttgtaagatgtgcagagatgaatctaagaggcccccttc

SEQ ID NO: 32038 - DNA, 60 bp, Homo sapiens
cagcagctttgctcagtgatacccacatgggaaaaatcccaggggatgttgcttactctt

SEQ ID NO: 32039 - DNA, 60 bp, Homo sapiens
gtggctgtcaaggcgggcttctccatcaaagacatcctgtccggactctgtgagcggcat

SEQ ID NO: 32040 - DNA, 60 bp, Homo sapiens
cttgcgaacaacacgatacttgttaagtggctaccccaaaacgatctgcttggtcacccg

SEQ ID NO: 32041 - DNA, 60 bp, Homo sapiens
gagtcaggcaaggattgtgcttcccccattatacaggtgacaaaactgagtcctggggaa

SEQ ID NO: 32042 - DNA, 60 bp, Homo sapiens
catcctcatctcaccattgtattgctatgccctcccataaaaacacattgatccctagca

SEQ ID NO: 32043 - DNA, 60 bp, Homo sapiens
atcatcgagaacccattcctcaatggagaggtcatccggctggatggggccattcgtatg

SEQ ID NO: 32044 - DNA, 60 bp, Homo sapiens
tcagcagcaaatctgagagccaccggaagagccttgggagcacggagggtgaaagtgaaa

SEQ ID NO: 32045 - DNA, 60 bp, Homo sapiens
aaccagatctcacacgacatccgccagcgcaacaagtgccttcccatcccctactactac

SEQ ID NO: 32046 - DNA, 60 bp, Homo sapiens
agtcagcagctgatccccgacagaaacgcagcagatgcagacgctcctgatgaaatcatc

SEQ ID NO: 32047 - DNA, 60 bp, Homo sapiens
gctccctcttctggtcctggctcagggggctgggattttgatatattttctaataaagga

SEQ ID NO: 32048 - DNA, 60 bp, Homo sapiens
gccaaggagaagtatcacttttagaggcagaggagcggaaggcagtgggtgtgaccaaaa

SEQ ID NO: 32049 - DNA, 60 bp, Homo sapiens
gctccaatcgaagactattaaaagaagtggctgtcgtggcaaggtagaccacaatgctgg

SEQ ID NO: 32050 - DNA, 60 bp, Homo sapiens; identical to SEQ ID NO: 10902

SEQ ID NO: 32051 - DNA, 60 bp, Homo sapiens
ctaagcctgctccagtgtttcctcatcattgattattgggctagctgtggatagcttgca

SEQ ID NO: 32052 - DNA, 60 bp, Homo sapiens; identical to SEQ ID NO: 31629

SEQ ID NO: 32053 - DNA, 60 bp, Homo sapiens
ggggttggattgtggttggagcagcttttatctccattggattttcctatgcattcccca

SEQ ID NO: 32054 - DNA, 60 bp, Homo sapiens
ctgaagttcagtctttgtacagagagataaaggatgctaaagagcaggtaagccctttgg

SEQ ID NO: 32055 - DNA, 60 bp, Homo sapiens; identical to SEQ ID NO: 14812

SEQ ID NO: 32056 - DNA, 60 bp, Homo sapiens
attgaagaccggagggatgagtgcttctccccacgtgctccccgacgactcacacatgga

SEQ ID NO: 32057 - DNA, 60 bp, Homo sapiens
cacagaacttaaggatggagccagctctgcattatctgaggtcacagggcctggggagat

SEQ ID NO: 32058 - DNA, 60 bp, Homo sapiens
ttgcactttaacggtagttccggtgtcaacatggacacgaacaaaaccttacccaggtgt

SEQ ID NO: 32059 - DNA, 60 bp, Homo sapiens
gtcctactgagcagcttgtctcaccagagcctgaagtccatgatattgaaagatctgaag

SEQ ID NO: 32060 - DNA, 60 bp, Homo sapiens
ggggcattgtgaggaactgtgcaaagacatttttgttacaaacctgtgggcctgttgcaa

SEQ ID NO: 32061 - DNA, 60 bp, Homo sapiens; identical to SEQ ID NO: 19933

SEQ ID NO: 32062 - DNA, 60 bp, Homo sapiens
cgtggcagtgcctgtggtctttgccctaatcttcctgctgggcacagtgggcaatgggct

SEQ ID NO: 32063 - DNA, 60 bp, Homo sapiens
atgaagagtgacagctatgcccgcttccctccggtcaaatgcttaccaggatttgctgct

SEQ ID NO: 32064 - DNA, 60 bp, Homo sapiens
ttgccctgttggatgaataggcacctctggaagagccaactgtgtgagatggtgcagccc

SEQ ID NO: 32065 - DNA, 60 bp, Homo sapiens
tggaaggatcccgccttggagaagctcagcctgttttgcgaggagagccgcagcgttaac

SEQ ID NO: 32066 - DNA, 60 bp, Homo sapiens; identical to SEQ ID NO: 31372

SEQ ID NO: 32067 - DNA, 60 bp, Homo sapiens
tagcctggagtcaggacaaatggatcgggctgcagagggttagaagcgagggcaccagca

SEQ ID NO: 32068 - DNA, 60 bp, Homo sapiens
gctagtgtcctccgatatgaagtcctggagcactgtcctggcagtgatggggaaagcttt

SEQ ID NO: 32069 - DNA, 60 bp, Homo sapiens; identical to SEQ ID NO: 31250

SEQ ID NO: 32070 - DNA, 60 bp, Homo sapiens
ccagtcactccacctttgacacattactagtaacaagaggggaccacatagtctctgttg

SEQ ID NO: 32071 - DNA, 60 bp, Homo sapiens
ggtaccttgctgtgtaggaggatgaaaggggagttgatagtctcataaaactaatttggc

SEQ ID NO: 32072 - DNA, 60 bp, Homo sapiens
ggaacaggtgcctcacatcgcactgttttgtcaagaaaaccggccttcaataccatatgc

SEQ ID NO: 32073 - DNA, 60 bp, Homo sapiens; identical to SEQ ID NO: 15960

SEQ ID NO: 32074 - DNA, 60 bp, Homo sapiens; identical to SEQ ID NO: 16237

SEQ ID NO: 32075 - DNA, 60 bp, Homo sapiens
tggggtccccgagatctcaggaatttttgtaggggattgaagccagagctagttgcgtcc

SEQ ID NO: 32076 - DNA, 60 bp, Homo sapiens
agggggaatgttctataaccagctctgtaaaggaaaagcactgatgtgtggtagtcacca

SEQ ID NO: 32077 - DNA, 60 bp, Homo sapiens
atgaggatggtgcctctgaggaaaactatgtgcccgtccagctcctccagtccaactgat

SEQ ID NO: 32078 - DNA, 60 bp, Homo sapiens
caagtaccaaaacgttgaattgatgatgcagttttcatatatcgagatgttcgctcgtgc

SEQ ID NO: 32079 - DNA, 60 bp, Homo sapiens
atccccatatggaatttatccatcaaccacataaaaacaaacagtgccttctgccctctg

SEQ ID NO: 32080 - DNA, 60 bp, Homo sapiens
ggaccgcacacgtttctatggtgcagaaattgtctctgccttggactatctacattccgg

SEQ ID NO: 32081 - DNA, 60 bp, Homo sapiens
ccagggagttctaagacgccagctctttgagatttgctcattcccctgtatttcccacat

SEQ ID NO: 32082 - DNA, 60 bp, Homo sapiens
tttaatcaagagagacaaaattgctgaggagctcagggctggattggcaggtgtgggctc

SEQ ID NO: 32083 - DNA, 60 bp, Homo sapiens
aactttgtggccttctctgccttcttctacactgtggactttttgcggacttcgatgggg

SEQ ID NO: 32084 - DNA, 60 bp, Homo sapiens
tcagttttcaggagtgggttgatttcagcacctacagtgtacagtcttgtattaagttgt

SEQ ID NO: 32085 - DNA, 60 bp, Homo sapiens
gttccctgaacccctcttggattaaggaagactgaagactagccccttttctggggaatt

SEQ ID NO: 32086 - DNA, 60 bp, Homo sapiens
agagcctgatgctctctgatagctgtgccataagtgcttgtgaggtatttgcaaagtgca

SEQ ID NO: 32087 - DNA, 60 bp, Homo sapiens
tcgtgtacaaagaagagcatccgttcgagaagcgccgctctgagggcgagaagatccgaa

SEQ ID NO: 32088 - DNA, 60 bp, Homo sapiens
caacagcagcatgacctatgaaaagctcagccgagctatgagatattactacaaaagaga

SEQ ID NO: 32089 - DNA, 60 bp, Homo sapiens
caggatttcctgaaagtttacaatgcagtagcattttggggtgtagggtggcagctcccc

SEQ ID NO: 32090 - DNA, 60 bp, Homo sapiens
gttggtagtggatccaaaggcacgttttacgacagaagaagccttaagacacccgtggct

SEQ ID NO: 32091 - DNA, 60 bp, Homo sapiens
ccaatggcttcagacgatcttgagtctcccatcatgggaaaaaattgtagcaggcagggt

SEQ ID NO: 32092 - DNA, 60 bp, Homo sapiens
gccgagatggacgaaaaaatgtggttccttgtgttctctctgtaaatggggacctagacc

SEQ ID NO: 32093 - DNA, 60 bp, Homo sapiens
caggagtgacacaggcagccagtacatagaggatagtattagccaaggtgcagtctgcaa

SEQ ID NO: 32094 - DNA, 60 bp, Homo sapiens
gtgggctcggcagcaccttgcctgtgtttctgtgagggaggctgctttctgtgaaatttc

SEQ ID NO: 32095 - DNA, 60 bp, Homo sapiens
gctgcgagaagaagtccacactatgttgcgcggagtcttgttctttagcacccccagaac

SEQ ID NO: 32096 - DNA, 60 bp, Homo sapiens
atccgatagctatgttctgctggagcattctgtgaagaaggcagtacattttgggttacc

SEQ ID NO: 32097 - DNA, 60 bp, Homo sapiens
aagtgagaccttcaactggaaattctgcatctactccacaaagtcagtgtcttccatctg

SEQ ID NO: 32098 - DNA, 60 bp, Homo sapiens
atacttctacctggcaggcaacgccaagtccatgccagcggacgtctcggaagccctgat

SEQ ID NO: 32099 - DNA, 60 bp, Homo sapiens
agacgacggactgagaccaaactgcaaaacatcccagatcaccacagccatcatcagcat

SEQ ID NO: 32100 - DNA, 60 bp, Homo sapiens
cccatcggcaaatcgcaatggcagcatgtgagtggaccattcagaaacttctgcttggtg

SEQ ID NO: 32101 - DNA, 60 bp, Homo sapiens
acatgggcctgccccagaaccgtatcattttttcacctgttgctcctaaagaggaacacg

SEQ ID NO: 32102 - DNA, 60 bp, Homo sapiens
ccatgttgtttaaaggctgtaattggagcagcttttggctgcgtaactgtgaactatggc

SEQ ID NO: 32103 - DNA, 60 bp, Homo sapiens
ttcctgctgcggcacaagatctgcacgccgctgaccctggagatgtactacacggagatg

SEQ ID NO: 32104 - DNA, 60 bp, Homo sapiens; identical to SEQ ID NO: 4855

SEQ ID NO: 32105 - DNA, 60 bp, Homo sapiens; identical to SEQ ID NO: 31517

SEQ ID NO: 32106 - DNA, 60 bp, Homo sapiens; identical to SEQ ID NO: 31518

SEQ ID NO: 32107 - DNA, 60 bp, Homo sapiens; identical to SEQ ID NO: 31519

SEQ ID NO: 32108 - DNA, 60 bp, Homo sapiens; identical to SEQ ID NO: 31558

SEQ ID NO: 32109 - DNA, 60 bp, Homo sapiens; identical to SEQ ID NO: 31302

SEQ ID NO: 32110 - DNA, 60 bp, Homo sapiens; identical to SEQ ID NO: 31987

SEQ ID NO: 32111 - DNA, 60 bp, Homo sapiens; identical to SEQ ID NO: 32014

SEQ ID NO: 32112 - DNA, 60 bp, Homo sapiens; identical to SEQ ID NO: 32015

SEQ ID NO: 32113 - DNA, 60 bp, Homo sapiens
gaacagatggactttcgctgaatgctttcgatgaacgaggcactgcggtcagcacttcac

SEQ ID NO: 32114 - DNA, 60 bp, Homo sapiens
ctctgtatggcagcaaatgtggcccatggcctgcagcaaaacgtcctatatgtagattcc

SEQ ID NO: 32115 - DNA, 60 bp, Homo sapiens
ctgaacagtaaagccccctgagtggaaggatcatgtcatatttatgtctgcattccccac

SEQ ID NO: 32116 - DNA, 60 bp, Homo sapiens
tcaaacctgccctcggacgctcctggagctttgtgcccagcactcggattctcctggaca

SEQ ID NO: 32117 - DNA, 60 bp, Homo sapiens
gggaatgtgaatgtacccttggacaaattgtttccagcaagaagctaactcgaccactgg

SEQ ID NO: 32118 - DNA, 60 bp, Homo sapiens; identical to SEQ ID NO: 32017

SEQ ID NO: 32119 - DNA, 60 bp, Homo sapiens; identical to SEQ ID NO: 32018

SEQ ID NO: 32120 - DNA, 60 bp, Homo sapiens; identical to SEQ ID NO: 32019

SEQ ID NO: 32121 - DNA, 60 bp, Homo sapiens
tcttatcacagaaagtgctgagccaagagctcctagctgccccttttgcagatgtgaagg

SEQ ID NO: 32122 - DNA, 60 bp, Homo sapiens
attgccctggcactgtactcagctctgttctcctactcaggctgggacaccctcaactat

SEQ ID NO: 32123 - DNA, 60 bp, Homo sapiens
aaaggggacaatgaaggtgactgtggggaggagcatgtcaggtttgggcttggttgtttt

SEQ ID NO: 32124 - DNA, 60 bp, Homo sapiens; identical to SEQ ID NO: 32020

SEQ ID NO: 32125 - DNA, 60 bp, Homo sapiens; identical to SEQ ID NO: 32021

SEQ ID NO: 32126 - DNA, 60 bp, Homo sapiens
gggctggcacagagccccaggcaagcttttaataaactgttggttattctaacagatctc

SEQ ID NO: 32127 - DNA, 60 bp, Homo sapiens
taagttattgctgttcgcccgctgtgtgtgctcatcctcaccctcattgactcaggcctg

SEQ ID NO: 32128 - DNA, 60 bp, Homo sapiens
atgagcggcaccctcgctagggagggacattggtgattggcagtcctgggctaagtgttg

SEQ ID NO: 32129 - DNA, 60 bp, Homo sapiens
agggtgaactgatcttagcaccggccaaataaatggaacctgctgagagagctgccagat

SEQ ID NO: 32130 - DNA, 60 bp, Homo sapiens; identical to SEQ ID NO: 32023

SEQ ID NO: 32131 - DNA, 60 bp, Homo sapiens
gaaagagatcgtctgctgctggcgacaatggagtcaatgaatggtggaaaactctattcc

SEQ ID NO: 32132 - DNA, 60 bp, Homo sapiens
caagagtggagagaagctcttcaatagctaagcatctccttacagtcactaatatagtag

SEQ ID NO: 32133 - DNA, 60 bp, Homo sapiens
catacccaagtccttcatgatcagcgcagacatggcccatgctgtgcatcccaactacct

SEQ ID NO: 32134 - DNA, 60 bp, Homo sapiens; identical to SEQ ID NO: 32025

SEQ ID NO: 32135 - DNA, 60 bp, Homo sapiens
ggggtatacaaaactaggatatgctggaaatacagaaccacagtttatcatcccttcctg

SEQ ID NO: 32136 - DNA, 60 bp, Homo sapiens
ccagtgtttggagtcatgtcgtaaaattggcttcatagttattggggttagggaggtggg

SEQ ID NO: 32137 - DNA, 60 bp, Homo sapiens; identical to SEQ ID NO: 32027

SEQ ID NO: 32138 - DNA, 60 bp, Homo sapiens
ggattccaacccagctgacagactccaaaactgcaggttctctgccctctgctgtgctgg

SEQ ID NO: 32139 - DNA, 60 bp, Homo sapiens; identical to SEQ ID NO: 32028

SEQ ID NO: 32140 - DNA, 60 bp, Homo sapiens
ggctgatgagatcgagaagattttgtgccacaagttcatgcgcttcatgatgatgcgagc

SEQ ID NO: 32141 - DNA, 60 bp, Homo sapiens
ggttggggacaagggccaaattggtgaccaccagtcatgcctaggacctggggcccaaaa

SEQ ID NO: 32142 - DNA, 60 bp, Homo sapiens
tttgccgctggtcgggattgggatgtcgaagaacacagtgtcgtcggcccgcttccggaa

SEQ ID NO: 32143 - DNA, 60 bp, Homo sapiens; identical to SEQ ID NO: 32030

SEQ ID NO: 32144 - DNA, 60 bp, Homo sapiens
tggaacaggaactgcataagtggcaggtgctagtggacagcatcacaggcatgagctctc

SEQ ID NO: 32145 - DNA, 60 bp, Homo sapiens; identical to SEQ ID NO: 32031

SEQ ID NO: 32146 - DNA, 60 bp, Homo sapiens
ggaatgctataagctggagagagatcctgacaacccccagtgactatctttgtgcccatc

SEQ ID NO: 32147 - DNA, 60 bp, Homo sapiens
ccagggaataaagtggaataatgttgataacagtgcttggcacctggaagtaggtggcag

SEQ ID NO: 32148 - DNA, 60 bp, Homo sapiens; identical to SEQ ID NO: 32032

SEQ ID NO: 32149 - DNA, 60 bp, Homo sapiens
tcttgagtgtctgcaaccctgatttcagccagatcaactgctctgaaggctacattcaga

SEQ ID NO: 32150 - DNA, 60 bp, Homo sapiens
cctctgtacccagacccccgatgtcagttactgacttcgatctctgatttgtgcttctag

SEQ ID NO: 32151 - DNA, 60 bp, Homo sapiens
tcacctgtggacattattgacaggaacaatcaccacaacatgatgtaggtgccacccacc

SEQ ID NO: 32152 - DNA, 60 bp, Homo sapiens
accacatgcacatccttactacagaatccgtcctttcatttcaacttatagcaagctatg

SEQ ID NO: 32153 - DNA, 60 bp, Homo sapiens
gagaacaatttagagaggaatacaaactcacccaagaactggaaatcctcactgacaggc

SEQ ID NO: 32154 - DNA, 60 bp, Homo sapiens
caacctcctcaacgacctctacaccagatttgacacactgactgattcccggaaaaaccc

SEQ ID NO: 32155 - DNA, 60 bp, Homo sapiens
aacaatagggatacacactggagaggtagttacaggtgtcataggacagcggatgcctcg

SEQ ID NO: 32156 - DNA, 60 bp, Homo sapiens
caggctggatctctgtttgaagtggatttctccttgctggatggagtcaagcctaatgtc

SEQ ID NO: 32157 - DNA, 60 bp, Homo sapiens
cccatctctatattcccaaatgttaccctgacccactccaatttaacgagaggtctctcc

SEQ ID NO: 32158 - DNA, 60 bp, Homo sapiens
gcctgaagagcttcctgcttaaaagggctagagtaggatcataggcctggagtttcctga

SEQ ID NO: 32159 - DNA, 60 bp, Homo sapiens; identical to SEQ ID NO: 32035

SEQ ID NO: 32160 - DNA, 60 bp, Homo sapiens
agagctgcaggcctggtgcagagagatgactgagactggactgcagagggcccaagacca

SEQ ID NO: 32161 - DNA, 60 bp, Homo sapiens
acagtgatggtccccattgcatttggaagtggcatcccccaaagctgccctaccttaaat

SEQ ID NO: 32162 - DNA, 60 bp, Homo sapiens; identical to SEQ ID NO: 32036

SEQ ID NO: 32163 - DNA, 60 bp, Homo sapiens
cctgttgtggcagagcagaagtagacgggtaccttccggtactcaacgtttgtctgtctt

SEQ ID NO: 32164 - DNA, 60 bp, Homo sapiens
cctctcagagccatttctatcgcaggacgcaaaagccaaatgagactgaccaaaaaggca

SEQ ID NO: 32165 - DNA, 60 bp, Homo sapiens
agatctcggggatttgggtttgtcacctttgagaacattgacgacgctaaggatgccatg

SEQ ID NO: 32166 - DNA, 60 bp, Homo sapiens
tgagacgcaagctgctcccttggctagctcatatgtggaaatagccctgtaattcgaggt

SEQ ID NO: 32167 - DNA, 60 bp, Homo sapiens
cccttaagcaggattgaagaccagtgaacgcccccgccttttggattttttgctcaattg

SEQ ID NO: 32168 - DNA, 60 bp, Homo sapiens
aagaaaagcctgcggacctcggttcagcgcacgagtaggacccgacagggaagactgcaa

SEQ ID NO: 32169 - DNA, 60 bp, Homo sapiens; identical to SEQ ID NO: 32037

SEQ ID NO: 32170 - DNA, 60 bp, Homo sapiens
attctcctccagaagccagactcagttggtgaccttgtcattccgtacaatgagaagcca

SEQ ID NO: 32171 - DNA, 60 bp, Homo sapiens
gtacttaaagcggaggagctaagccacctgccaaaatgtgcaaaggacttgcagctttgc

SEQ ID NO: 32172 - DNA, 60 bp, Homo sapiens; identical to SEQ ID NO: 14807

SEQ ID NO: 32173 - DNA, 60 bp, Homo sapiens; identical to SEQ ID NO: 32038

SEQ ID NO: 32174 - DNA, 60 bp, Homo sapiens
cctgacgtgtctcattcacagctaaataataggccataggacttttggtaggtttaaact

SEQ ID NO: 32175 - DNA, 60 bp, Homo sapiens
tgcggacttcctgccacgtgttcatggtggacccagacttgtttaatcacaagatccacc

SEQ ID NO: 32176 - DNA, 60 bp, Homo sapiens
agagaatgatgaccgctctctcgtgttaattcacaaaacccagcacctcaggcagtgtgg

SEQ ID NO: 32177 - DNA, 60 bp, Homo sapiens
acctgccatgagccaagcatgttttggagccaggatgtggcagtagacagggcagagagt

SEQ ID NO: 32178 - DNA, 60 bp, Homo sapiens
agagatgttttgcttttggggaaacagctggaagcagcagtgcggttccctaaagtgctg

SEQ ID NO: 32179 - DNA, 60 bp, Homo sapiens
agttttttgagcttatttccaaagctcagagcaacagagcagatgaccaacgtgggctgc

SEQ ID NO: 32180 - DNA, 60 bp, Homo sapiens
cccatggcagccgagacctcccagtcaacagaatcatcgatgtggatcttgtaactggct

SEQ ID NO: 32181 - DNA, 60 bp, Homo sapiens
gtgtcacgggcatttctcaaaggaagcaggggattcagtgagtgtgaaggtgaacaggat

SEQ ID NO: 32182 - DNA, 60 bp, Homo sapiens
acacttctagaaatgagctggtttaatccccacaaatactctacgaggtagggcctgtca

SEQ ID NO: 32183 - DNA, 60 bp, Homo sapiens
aagtttgatgctcttttcacagacccagccttaccctgtggggtgatcctggctgagtat

SEQ ID NO: 32184 - DNA, 60 bp, Homo sapiens
cagatcacatgaccttcctgcagcgggtgaagaacatgctcattgccttttcacagaact

SEQ ID NO: 32185 - DNA, 60 bp, Homo sapiens
cctgcaaagggtcaagaacatgctctaccctctggccctgtcctacatttgccatacttt

SEQ ID NO: 32186 - DNA, 60 bp, Homo sapiens; identical to SEQ ID NO: 32040

SEQ ID NO: 32187 - DNA, 60 bp, Homo sapiens
ggcttctgcagatggttgcaattgatccttaaccaataatggtcagtcctcatctctgtc

SEQ ID NO: 32188 - DNA, 60 bp, Homo sapiens; identical to SEQ ID NO: 32041

SEQ ID NO: 32189 - DNA, 60 bp, Homo sapiens; identical to SEQ ID NO: 32042

SEQ ID NO: 32190 - DNA, 60 bp, Homo sapiens
tcatcaacactgccagtgtggctgccttcgagggtcaggttggacaagctgcatactctg

SEQ ID NO: 32191 - DNA, 60 bp, Homo sapiens; identical to SEQ ID NO: 32043

SEQ ID NO: 32192 - DNA, 60 bp, Homo sapiens
caagttctaaacccaactccaaagcaccctcagcaccaactttcactcactcagacatcc

SEQ ID NO: 32193 - DNA, 60 bp, Homo sapiens
aaatcagcagcccagcccatcgggggatccttgaactccaccaccgactcagccctctga

SEQ ID NO: 32194 - DNA, 60 bp, Homo sapiens; identical to SEQ ID NO: 32045

SEQ ID NO: 32195 - DNA, 60 bp, Homo sapiens
acatccaacagctggaacttccatccagtccttcacatgatgggcacctgtgggaaacct

SEQ ID NO: 32196 - DNA, 60 bp, Homo sapiens; identical to SEQ ID NO: 32046

SEQ ID NO: 32197 - DNA, 60 bp, Homo sapiens
cttccgaagtctcagtgccctatttggccgagatcagggaccgacatttgactattctca

SEQ ID NO: 32198 - DNA, 60 bp, Homo sapiens
aaaactgttgaacgttggggtgcgagaggccctgcgtgatgaagagtgggactgcctgtt

SEQ ID NO: 32199 - DNA, 60 bp, Homo sapiens
gggaattgttactggatcctcagggttctgtacccctagccaggaaaatcctaaaggtcc

SEQ ID NO: 32200 - DNA, 60 bp, Homo sapiens
ttctcagagggatgtgagggaactgaactctggtgccgtgctagggggtaggggcctctc

SEQ ID NO: 32201 - DNA, 60 bp, Homo sapiens; identical to SEQ ID NO: 32047

SEQ ID NO: 32202 - DNA, 60 bp, Homo sapiens; identical to SEQ ID NO: 32048

SEQ ID NO: 32203 - DNA, 60 bp, Homo sapiens
catgggcttcaacctgactttccacctttcctacaaattccgattactgttgctgttgac

SEQ ID NO: 32204 - DNA, 60 bp, Homo sapiens
gttattcatttatcctgtacaatcatctgtgaagtggtggtgtcaggtgagaaggcgtcc

SEQ ID NO: 32205 - DNA, 60 bp, Homo sapiens; identical to SEQ ID NO: 32049

SEQ ID NO: 32206 - DNA, 60 bp, Homo sapiens; identical to SEQ ID NO: 10902

SEQ ID NO: 32207 - DNA, 60 bp, Homo sapiens
gccaccaatccatacacagaagcaaactacaaaccaacttttctatcagacgatgaattg

SEQ ID NO: 32208 - DNA, 60 bp, Homo sapiens
ccacaaccagtgaacggggaaatcagggtgaaatctatggaatatgtttctcggcacgcg

SEQ ID NO: 32209 - DNA, 60 bp, Homo sapiens
gattgctgaggaaatcatggaaatccacaggataagagggtcatcgccttctagctgtgg

SEQ ID NO: 32210 - DNA, 60 bp, Homo sapiens; identical to SEQ ID NO: 31629

SEQ ID NO: 32211 - DNA, 60 bp, Homo sapiens
ctttcctgtgaaacctgaaacaaggtgatctggggaaccaaagactctgggactcttggt

SEQ ID NO: 32212 - DNA, 60 bp, Homo sapiens
gctgtatattccatcagttgattgacgtgttattatgggatcgctgtctaaagaacccaa

SEQ ID NO: 32213 - DNA, 60 bp, Homo sapiens; identical to SEQ ID NO: 10360

SEQ ID NO: 32214 - DNA, 60 bp, Homo sapiens
taggtttaaagaagcaagagctggaagggtcttctcctggaaggtgagatattggtctgt

SEQ ID NO: 32215 - DNA, 60 bp, Homo sapiens
agtaggactggcaggtgagtcagtgtcctagggggagagttaaggcagaagtggactagt

SEQ ID NO: 32216 - DNA, 60 bp, Homo sapiens
cctggttatggagcctaatggcttggatttcagtcctggctctacaacttactcactgtg

SEQ ID NO: 32217 - DNA, 60 bp, Homo sapiens; identical to SEQ ID NO: 32054

SEQ ID NO: 32218 - DNA, 60 bp, Homo sapiens
aaaacaactctctcaggccttactcctcctgactgggcatcatgtctttgccaacggaga

SEQ ID NO: 32219 - DNA, 60 bp, Homo sapiens
cccaaggctacacctgaatggtgggaagctctttgctgctatataaaatgaatcaggctc

SEQ ID NO: 32220 - DNA, 60 bp, Homo sapiens; identical to SEQ ID NO: 11897

SEQ ID NO: 32221 - DNA, 60 bp, Homo sapiens; identical to SEQ ID NO: 14812

SEQ ID NO: 32222 - DNA, 60 bp, Homo sapiens
cagaaactaggattttagtatcaagtctgggctgttggtggaggttgtactgtggtacca

SEQ ID NO: 32223 - DNA, 60 bp, Homo sapiens; identical to SEQ ID NO: 32056

SEQ ID NO: 32224 - DNA, 60 bp, Homo sapiens
gaggttggcaaagccgcagttattgaattaatggaagcaacttgtaactcaagatgcacg

SEQ ID NO: 32225 - DNA, 60 bp, Homo sapiens
cgaagccaaactttctgtcttctcaaccgtagatgctcctgtcgctccttcagacaaagg

SEQ ID NO: 32226 - DNA, 60 bp, Homo sapiens
tccttgcttgtgatacgatttccacgtctgacaccctaaacacgctttcctgacatccgg

SEQ ID NO: 32227 - DNA, 60 bp, Homo sapiens
actggaagccctcgtgctgactctaacagcgctcacgcagaagccagtcctcgctgacca

SEQ ID NO: 32228 - DNA, 60 bp, Homo sapiens; identical to SEQ ID NO: 32057

SEQ ID NO: 32229 - DNA, 60 bp, Homo sapiens; identical to SEQ ID NO: 32058

SEQ ID NO: 32230 - DNA, 60 bp, Homo sapiens
aaacttggagccttttcttgaaagacagctggctgtccagagccttctaccaactgcagt

SEQ ID NO: 32231 - DNA, 60 bp, Homo sapiens
taaactgtttcagagcttcttccctaagccataaactgtctcacctaaacaagatagacc

SEQ ID NO: 32232 - DNA, 60 bp, Homo sapiens
cataagaatctcaatcttggggctaaatgccttgtttctttgcacctcttttcaagtcct

SEQ ID NO: 32233 - DNA, 60 bp, Homo sapiens
agcgagtgccatacgtcatcatttatgggacccccggagtaccacttatccagcttgtaa

SEQ ID NO: 32234 - DNA, 60 bp, Homo sapiens; identical to SEQ ID NO: 32060

SEQ ID NO: 32235 - DNA, 60 bp, Homo sapiens; identical to SEQ ID NO: 19933

SEQ ID NO: 32236 - DNA, 60 bp, Homo sapiens; identical to SEQ ID NO: 32062

SEQ ID NO: 32237 - DNA, 60 bp, Homo sapiens; identical to SEQ ID NO: 32063

SEQ ID NO: 32238 - DNA, 60 bp, Homo sapiens
aggtggggaaactaaggcccagagaagtgaggaccccgcagactatcaatcccagtctct

SEQ ID NO: 32239 - DNA, 60 bp, Homo sapiens
gactgcgctctatcgaggtcgttaaattcttcggaaatgcctcacatatagtttggcagc

SEQ ID NO: 32240 - DNA, 60 bp, Homo sapiens; identical to SEQ ID NO: 32064

SEQ ID NO: 32241 - DNA, 60 bp, Homo sapiens
tggccgcggcaccttacgcttcagctgttgatccgctggtcccctcttttggggtagatg

SEQ ID NO: 32242 - DNA, 60 bp, Homo sapiens
ttgtgcagacggcacctgtttctttcggcaacagtgtgggacagcgagcacggagtcaca

SEQ ID NO: 32243 - DNA, 60 bp, Homo sapiens; identical to SEQ ID NO: 32065

SEQ ID NO: 32244 - DNA, 60 bp, Homo sapiens; identical to SEQ ID NO: 31630

SEQ ID NO: 32245 - DNA, 60 bp, Homo sapiens; identical to SEQ ID NO: 31631

SEQ ID NO: 32246 - DNA, 60 bp, Homo sapiens; identical to SEQ ID NO: 31632

SEQ ID NO: 32247 - DNA, 60 bp, Homo sapiens; identical to SEQ ID NO: 31633

SEQ ID NO: 32248 - DNA, 60 bp, Homo sapiens
agaatgtaagaggctgcaaggtgaagttcagaggctacgggaggagaacaagcagttcaa

SEQ ID NO: 32249 - DNA, 60 bp, Homo sapiens
cagcatcagacgtactcgtcataagtgagaggcgtgtgttgactgattgacccagcgctt

SEQ ID NO: 32250 - DNA, 60 bp, Homo sapiens; identical to SEQ ID NO: 32067

SEQ ID NO: 32251 - DNA, 60 bp, Homo sapiens
cctaccataggatctgttgccatgctcaaatgagttactgaataaggtgcttctgcttct

SEQ ID NO: 32252 - DNA, 60 bp, Homo sapiens
gcccaaagaagagttgaaggcatgggagccaacattttattgaagaagccacagaggctg

SEQ ID NO: 32253 - DNA, 60 bp, Homo sapiens; identical to SEQ ID NO: 31250

SEQ ID NO: 32254 - DNA, 60 bp, Homo sapiens
ctgacgatggcccctggtttaatcactttggaaatagttccctttcgagttgcagcttac

SEQ ID NO: 32255 - DNA, 60 bp, Homo sapiens; identical to SEQ ID NO: 32070

SEQ ID NO: 32256 - DNA, 60 bp, Homo sapiens; identical to SEQ ID NO: 32071

SEQ ID NO: 32257 - DNA, 60 bp, Homo sapiens
aacgtaggaaaaaaagttgtcaggagcgggcaggatgacccccacatcccgtttccacct

SEQ ID NO: 32258 - DNA, 60 bp, Homo sapiens
atccggagaatccatgatgtgtgcatttgccgatccccgaggtgagatggagactggcaa

SEQ ID NO: 32259 - DNA, 60 bp, Homo sapiens
gcttgtgctgaatgcttcatggcggtttcatgtgcaacatgtcaagaaatccgacggacc

SEQ ID NO: 32260 - DNA, 60 bp, Homo sapiens; identical to SEQ ID NO: 32072

SEQ ID NO: 32261 - DNA, 60 bp, Homo sapiens
cgtcccattgctctgaatctgtgtgcagacaaagtttcttctgttcgttggatttcctac

SEQ ID NO: 32262 - DNA, 60 bp, Homo sapiens
gctctgaggtgcaacttcttcacatactgtacatacctgtgaccactcttgggagtgctg

SEQ ID NO: 32263 - DNA, 60 bp, Homo sapiens
taagagcaggtgggtgccgagtgtctggcacagcttggatgccgcccactgaagacagca

SEQ ID NO: 32264 - DNA, 60 bp, Homo sapiens; identical to SEQ ID NO: 15960

SEQ ID NO: 32265 - DNA, 60 bp, Homo sapiens
ctctgcaaggtttgtgatgtcttgaagtgccgagtgtcattagatgtctgaaggcaagtt

SEQ ID NO: 32266 - DNA, 60 bp, Homo sapiens; identical to SEQ ID NO: 16237

SEQ ID NO: 32267 - DNA, 60 bp, Homo sapiens
ggtgagagctcaggggtctttaggggaggaagcaaaactgatgccccctttcctgtggct

SEQ ID NO: 32268 - DNA, 60 bp, Homo sapiens
gaggacgcacctgataacagcagcctggagctcctagcagataccagcgggcaagcagaa

SEQ ID NO: 32269 - DNA, 60 bp, Homo sapiens
ttttgaaaggggtgtttacgagcagctgtgagtgaggggacaaggggcaggtcccaggag

SEQ ID NO: 32270 - DNA, 60 bp, Homo sapiens; identical to SEQ ID NO: 32076

SEQ ID NO: 32271 - DNA, 60 bp, Homo sapiens
agttttcaggactgagccacctttcccgaaagttcaccgagtggtgctatgggcctgtcc

SEQ ID NO: 32272 - DNA, 60 bp, Homo sapiens
ctccaagtgggtggcccagaaccctgcagagaaaaagcctgtcctcctcagggcctctgt

SEQ ID NO: 32273 - DNA, 60 bp, Homo sapiens
ctcatgagcgagaccgtcaacagtgtcgccactgacagctggagcatctggaagctgcag

SEQ ID NO: 32274 - DNA, 60 bp, Homo sapiens
atggctattggtggtgcaggaagaagcagcgggcaggtgtgatgctgaccgttggcacta

SEQ ID NO: 32275 - DNA, 60 bp, Homo sapiens
tgcctgcttcctggggacacactcaagggttaagctacagtgcttgccatctgtttacag

SEQ ID NO: 32276 - DNA, 60 bp, Homo sapiens; identical to SEQ ID NO: 32077

SEQ ID NO: 32277 - DNA, 60 bp, Homo sapiens; identical to SEQ ID NO: 32078

SEQ ID NO: 32278 - DNA, 60 bp, Homo sapiens
tggatgatggctttggcatggaccccttcccagacgacttgacagcctcttggcccgact

SEQ ID NO: 32279 - DNA, 60 bp, Homo sapiens
tgttaatttcccccactaaatcagtaattattacaatcctgtccctgctgtttaccctgc

SEQ ID NO: 32280 - DNA, 60 bp, Homo sapiens; identical to SEQ ID NO: 32080

SEQ ID NO: 32281 - DNA, 60 bp, Homo sapiens
tgcggcagtcaagagtttcaaatccagctgccaggggtgaaagcaaccctctgcatctct

SEQ ID NO: 32282 - DNA, 60 bp, Homo sapiens
gagatgctgccatttaaccccttggtactgaaaatgagaaaatccccaactatgcatgcc

SEQ ID NO: 32283 - DNA, 60 bp, Homo sapiens
gccttatatcgtgatctgcttcttggtggttaatggtcatggtcacctggtcactccaac

SEQ ID NO: 32284 - DNA, 60 bp, Homo sapiens; identical to SEQ ID NO: 32081

SEQ ID NO: 32285 - DNA, 60 bp, Homo sapiens; identical to SEQ ID NO: 32082

SEQ ID NO: 32286 - DNA, 60 bp, Homo sapiens; identical to SEQ ID NO: 32083

SEQ ID NO: 32287 - DNA, 60 bp, Homo sapiens; identical to SEQ ID NO: 32084

SEQ ID NO: 32288 - DNA, 60 bp, Homo sapiens
tgacctccagtgccgccggcctcaagatcagacatggcccagaacttgaaggacttggcg

SEQ ID NO: 32289 - DNA, 60 bp, Homo sapiens
gcacagagccatcttcttcaatcggatcggtggagtgcagcaggacactatcctggccga

SEQ ID NO: 32290 - DNA, 60 bp, Homo sapiens
cgaaaaatctcctcccctacaggctccaaagacctacagatggtgaatatctccctgcga

SEQ ID NO: 32291 - DNA, 60 bp, Homo sapiens
gtcgtagagggaatggcctagagtgtcctgcctctcacatttatgtcccctaataatgtc

SEQ ID NO: 32292 - DNA, 60 bp, Homo sapiens; identical to SEQ ID NO: 32085

SEQ ID NO: 32293 - DNA, 60 bp, Homo sapiens
accagttgggacagtcttgttgcaaataccagaacctcaagaatcgaacagtgacgcagg

SEQ ID NO: 32294 - DNA, 60 bp, Homo sapiens
attcactgcctctcacttggggcaggaggggaggtgtaggctagggagcctgttgtattt

SEQ ID NO: 32295 - DNA, 60 bp, Homo sapiens
cctcctgtggactgccattgtctgtgacagtggtcatcatgcagacttactgtattcagc

SEQ ID NO: 32296 - DNA, 60 bp, Homo sapiens; identical to SEQ ID NO: 32087

SEQ ID NO: 32297 - DNA, 60 bp, Homo sapiens
ttgacaggtgcagcttcggggctgcattccttctgtctcctaattttcatctctttatca

SEQ ID NO: 32298 - DNA, 60 bp, Homo sapiens
cattcccaggagacccctggagattatgcgtgaattacatgacaatggcacgtcttaccg

SEQ ID NO: 32299 - DNA, 60 bp, Homo sapiens
attacactggcatttataagggattaggcacaccaggtaccctatgcttcaatcctgtcc

SEQ ID NO: 32300 - DNA, 60 bp, Homo sapiens; identical to SEQ ID NO: 32088

SEQ ID NO: 32301 - DNA, 60 bp, Homo sapiens; identical to SEQ ID NO: 32089

SEQ ID NO: 32302 - DNA, 60 bp, Homo sapiens; identical to SEQ ID NO: 32090

SEQ ID NO: 32303 - DNA, 60 bp, Homo sapiens
gtctgtatattaatgggagatgggcagaaatgtggcctcttcctgaacacagccttgcgg

SEQ ID NO: 32304 - DNA, 60 bp, Homo sapiens; identical to SEQ ID NO: 32091

SEQ ID NO: 32305 - DNA, 60 bp, Homo sapiens
ccctggggaaaggagttaatagaaaccctgtggaacctaggagatcacgaacttttacac

SEQ ID NO: 32306 - DNA, 60 bp, Homo sapiens
ccacccttaagccctgagtctgtgactcttgagagtgcatgaacactgaattacagctgg

SEQ ID NO: 32307 - DNA, 60 bp, Homo sapiens; identical to SEQ ID NO: 32093

SEQ ID NO: 32308 - DNA, 60 bp, Homo sapiens; identical to SEQ ID NO: 32094

SEQ ID NO: 32309 - DNA, 60 bp, Homo sapiens; identical to SEQ ID NO: 32095

SEQ ID NO: 32310 - DNA, 60 bp, Homo sapiens
tgacatcatcaccctctatatctctgccatcaaggcgctgcgcgtgctggacccttccat

SEQ ID NO: 32311 - DNA, 60 bp, Homo sapiens
acatcatcagcctgctggtcagcatctacggcagcaaggacctcttcatcaatgagtacc

SEQ ID NO: 32312 - DNA, 60 bp, Homo sapiens
catgctccgcatgtttgtggtgactgggcctgcactggccgagattgacctgcaggagct

SEQ ID NO: 32313 - DNA, 60 bp, Homo sapiens
agggcccagatattacactgtcaaaactttacaagttaattgaagagtcttgtccacagc

SEQ ID NO: 32314 - DNA, 60 bp, Homo sapiens
aaaagtaatggggaagagggctatggccggagcttgagatacgccgctctgaatcttgcc

SEQ ID NO: 32315 - DNA, 60 bp, Homo sapiens
tgactttacgcctccactcaagatagctgacgggcatggcaaagcgcagcaggtctgctg

SEQ ID NO: 32316 - DNA, 60 bp, Homo sapiens
ctgtgtggtaggtttctctctgttccctgtatcctaataacatctgtggaaattcccttt

SEQ ID NO: 32317 - DNA, 60 bp, Homo sapiens
ataaacatgatgctggcaaacctgtacaagaaggctggtcaggagcgcccttcagtcacc

SEQ ID NO: 32318 - DNA, 60 bp, Homo sapiens
atgatcgaatgagggttaaatgattatttcatgtaaagctcttagccctgtgcctggtac

SEQ ID NO: 32319 - DNA, 60 bp, Homo sapiens
gtgactagcacggtcgaggggatcttaacctaacacgtgggggatgagtggtatatagat

SEQ ID NO: 32320 - DNA, 60 bp, Homo sapiens
cctgttcccagaagtcattgtcctgggctatccagatgtccctagtaaatcttgcttcct

SEQ ID NO: 32321 - DNA, 60 bp, Homo sapiens
gagagccacaaagttaattcagtgttcttgaggccctttgcttgtctggaagtctgatgt

SEQ ID NO: 32322 - DNA, 60 bp, Homo sapiens; identical to SEQ ID NO: 32098

SEQ ID NO: 32323 - DNA, 60 bp, Homo sapiens; identical to SEQ ID NO: 32099

SEQ ID NO: 32324 - DNA, 60 bp, Homo sapiens
cagtgcagggttctggtgagagtaaaaggcaagttagactggttataaaaatccagcgct

SEQ ID NO: 32325 - DNA, 60 bp, Homo sapiens; identical to SEQ ID NO: 32100

SEQ ID NO: 32326 - DNA, 60 bp, Homo sapiens
tacaatcctgatttgtactgtgttcgcagtgacctggggaacctgctcaaagccctgggt

SEQ ID NO: 32327 - DNA, 60 bp, Homo sapiens
cagcttcagtcctccttgggagacggggcattgtgagaatgtaacttaaagcctggcttt

SEQ ID NO: 32328 - DNA, 60 bp, Homo sapiens; identical to SEQ ID NO: 32101

SEQ ID NO: 32329 - DNA, 60 bp, Homo sapiens
gggatctcaacaaagggtcgagggtttgaggcttaaacaagccaacatatgaatatatgt

SEQ ID NO: 32330 - DNA, 60 bp, Homo sapiens
ggctgtgcacctattctgtagttgcagctgatgcctgaatgtatcctagctgacaaatta

SEQ ID NO: 32331 - DNA, 60 bp, Homo sapiens
caatgccctcaaggctgtgaccttacagccattttacatagcacatcattcctcctatag

SEQ ID NO: 32332 - DNA, 60 bp, Homo sapiens
ttgccaagtcttcaactcttcattgagctatcttcacaaaacagtcctttgaaactgagg

SEQ ID NO: 32333 - DNA, 60 bp, Homo sapiens
gtgctcacatgagcctccttccagacaaaaaaacagttcactattacgcagagcttggcc

SEQ ID NO: 32334 - DNA, 60 bp, Homo sapiens
tgccctgaacatgctcttacaaagatgtaactgaaagacttttcgaatggaccctatggg

SEQ ID NO: 32335 - DNA, 60 bp, Homo sapiens
ggcatacagttcttgactttggacaatccaagagtgaaccagaatgcagttttccttgag

SEQ ID NO: 32336 - DNA, 60 bp, Homo sapiens; identical to SEQ ID NO: 32102

SEQ ID NO: 32337 - DNA, 60 bp, Homo sapiens; identical to SEQ ID NO: 32103
